(19) United States
(12) Patent Application Publication
(10) Pub. No.: US 2005/0222066 A1
(43) Pub. Date: Oct. 6, 2005

(54) RNA interference mediated inhibition of vascular endothelial growth factor and vascular endothelial growth factor receptor gene expression using short interfering nucleic acid (siNA)

(75) Inventors: Ivan Richards, Kalamazoo, MI (US); James McSwiggen, Boulder, CO (US)

Correspondence Address: MCDONNELL BOEHNEN HULBERT & BERGHOFF LLP, 300 S. WACKER DRIVE, 32ND FLOOR, CHICAGO, IL, 60606, US

(73) Assignee: Sirna Therapeutics, Inc., Boulder, IL (US)

(21) Appl. No.: 10/962,898

(22) Filed: Oct. 12, 2004

Related U.S. Application Data
(63) Continuation-in-part of application No. 10/944,611, filed on Sep. 16, 2004.
Application No. 10/944,611 is a continuation-in-part of application No. 10/844,076, filed on May 11, 2004.
Application No. 10/844,076 is a continuation-in-part of application No. 10/831,620, filed on Apr. 23, 2004.
Application No. 10/831,620 is a continuation-in-part of application No. 10/764,957, filed on Jan. 26, 2004.
Application No. 10/764,957 is a continuation-in-part of application No. 10/670,011, filed on Sep. 23, 2003.
Application No. 10/670,011 is a continuation-in-part of application No. 10/665,255, filed on Sep. 16, 2003.
Application No. 10/665,255 is a continuation-in-part of application No. 10/664,767, filed on Sep. 16, 2003, now abandoned.
Application No. 10/664,767 is a continuation-in-part of application No. PCT/US03/05022, filed on Feb. 20, 2003.
(63) Continuation-in-part of application No. PCT/US04/16390, filed on May 24, 2004.
Application No. PCT/US04/16390 is a continuation-in-part of application No. 10/826,966, filed on Apr. 16, 2004.
Application No. 10/826,966 is a continuation-in-part of application No. 10/757,803, filed on Jan. 14, 2004.
Application No. 10/757,803 is a continuation-in-part of application No. 10/720,448, filed on Nov. 24, 2003.
Application No. 10/720,448 is a continuation-in-part of application No. 10/693,059, filed on Oct. 23, 2003.
Application No. 10/693,059 is a continuation-in-part of application No. 10/444,853, filed on May 23, 2003.
Application No. 10/444,853 is a continuation-in-part of application No. PCT/US03/05346, filed on Feb. 20, 2003.
Application No. 10/444,853 is a continuation-in-part of application No. PCT/US03/05028, filed on Feb. 20, 2003.
(63) Continuation-in-part of application No. PCT/US04/13456, filed on Apr. 30, 2004.
Application No. PCT/US04/13456 is a continuation-in-part of application No. 10/780,447, filed on Feb. 13, 2004.
Application No. 10/780,447 is a continuation-in-part of application No. 10/427,160, filed on Apr. 30, 2003.
Application No. 10/427,160 is a continuation-in-part of application No. PCT/US02/15876, filed on May 17, 2002.
(63) Continuation-in-part of application No. 10/727,780, filed on Dec. 3, 2003.
(63) Continuation-in-part of application No. 10/922,675, filed on Aug. 20, 2004.
Application No. 10/922,675 is a continuation-in-part of application No. 10/863,973, filed on Jun. 9, 2004.
Application No. 10/863,973 is a continuation-in-part of application No. PCT/US03/04566, filed on Feb. 14, 2003.
(60) Provisional application No. 60/393,796, filed on Jul. 3, 2002.
(60) Provisional application No. 60/399,348, filed on Jul. 29, 2002.
(60) Provisional application No. 60/358,580, filed on Feb. 20, 2002.
(60) Provisional application No. 60/358,580, filed on Feb. 20, 2002.
(60) Provisional application No. 60/363,124, filed on Mar. 11, 2002.
(60) Provisional application No. 60/363,124, filed on Mar. 11, 2002.
(60) Provisional application No. 60/386,782, filed on Jun. 6, 2002.
(60) Provisional application No. 60/386,782, filed on Jun. 6, 2002.
(60) Provisional application No. 60/406,784, filed on Aug. 29, 2002.
(60) Provisional application No. 60/406,784, filed on Aug. 29, 2002.
(60) Provisional application No. 60/408,378, filed on Sep. 5, 2002.
(60) Provisional application No. 60/408,378, filed on Sep. 5, 2002.
(60) Provisional application No. 60/409,493, filed on Sep. 9, 2002.
(60) Provisional application No. 60/409,493, filed on Sep. 9, 2002.
(60) Provisional application No. 60/440,129, filed on Jan. 15, 2003.
(60) Provisional application No. 60/440,129, filed on Jan. 15, 2003.
(60) Provisional application No. 60/292,217, filed on May 18, 2001.
(60) Provisional application No. 60/362,016, filed on Mar. 6, 2002.
(60) Provisional application No. 60/306,883, filed on Jul. 20, 2001.
(60) Provisional application No. 60/311,865, filed on Aug. 13, 2001.
(60) Provisional application No. 60/543,480, filed on Feb. 10, 2004.

(51) Int. Cl. A61K 48/00; C07H 21/02

(52) U.S. Cl. 514/44; 536/23.1

(57) ABSTRACT

This invention relates to compounds, compositions, and methods useful for modulating VEGF and/or VEGFR gene expression using short interfering nucleic acid (siNA) molecules. This invention also relates to compounds, compositions, and methods useful for modulating the expression and activity of other genes involved in pathways of VEGF and/or VEGFR gene expression and/or activity by RNA interference (RNAi) using small nucleic acid molecules. In particular, the instant invention features small nucleic acid molecules, such as short interfering nucleic acid (siNA), short interfering RNA (siRNA), double-stranded RNA (dsRNA), micro-RNA (miRNA), and short hairpin RNA (shRNA) molecules and methods used to modulate the expression of VEGF and/or VEGFR genes.

[0001] This application is a continuation-in-part of U.S. patent application Ser. No. 10/944,611, filed Sep. 16, 2004, which is a continuation-in-part of U.S. patent application Ser. No. 10/844,076, filed May 11, 2004, which is a continuation-in-part of U.S. patent application Ser. No. 10/831,620, filed Apr. 23, 2004, which is a continuation-in-part of U.S. patent application Ser. No. 10/764,957, filed Jan. 26, 2004, which is a continuation-in-part of U.S. Ser. No. 10/670,011, filed Sep. 23, 2003, which is a continuation-in-part of both U.S. Ser. No. 10/665,255 and U.S. Ser. No. 10/664,767, filed Sep. 16, 2003, which are continuations-in-part of PCT/US03/05022, filed Feb. 20, 2003, which claims the benefit of U.S. Provisional Application No. 60/393,796 filed Jul. 3, 2002 and claims the benefit of U.S. Provisional Application No. 60/399,348 filed Jul. 29, 2002. This application is also a continuation-in-part of International Patent Application No. PCT/US04/16390, filed May 24, 2004, which is a continuation-in-part of U.S. patent application Ser. No. 10/826,966, filed Apr. 16, 2004, which is continuation-in-part of U.S. patent application Ser. No. 10/757,803, filed Jan. 14, 2004, which is a continuation-in-part of U.S. patent application Ser. No. 10/720,448, filed Nov. 24, 2003, which is a continuation-in-part of U.S. patent application Ser. No. 10/693,059, filed Oct. 23, 2003, which is a continuation-in-part of U.S. patent application Ser. No. 10/444,853, filed May 23, 2003, which is a continuation-in-part of International Patent Application No. PCT/US03/05346, filed Feb. 20, 2003, and a continuation-in-part of International Patent Application No. PCT/US03/05028, filed Feb. 20, 2003, both of which claim the benefit of U.S. Provisional Application No. 60/358,580 filed Feb. 20, 2002, U.S. Provisional Application No. 60/363,124 filed Mar. 11, 2002, U.S. Provisional Application No. 60/386,782 filed Jun. 6, 2002, U.S. Provisional Application No. 60/406,784 filed Aug. 29, 2002, U.S. Provisional Application No. 60/408,378 filed Sep. 5, 2002, U.S. Provisional Application No. 60/409,293 filed Sep. 9, 2002, and U.S. Provisional Application No. 60/440,129 filed Jan. 15, 2003. This application is also a continuation-in-part of International Patent Application No. PCT/US04/13456, filed Apr. 30, 2004, which is a continuation-in-part of U.S. patent application Ser. No. 10/780,447, filed Feb. 13, 2004, which is a continuation-in-part of U.S. patent application Ser. No. 10/427,160, filed Apr. 30, 2003, which is a continuation-in-part of International Patent Application No. PCT/US02/15876 filed May 17, 2002, which claims the benefit of U.S. Provisional Application No. 60/292,217, filed May 18, 2001, U.S. Provisional Application No. 60/362,016, filed Mar. 6, 2002, U.S. Provisional Application No. 60/306,883, filed Jul. 20, 2001, and U.S. Provisional Application No. 60/311,865, filed Aug. 13, 2001. This application is also a continuation-in-part of U.S. patent application Ser. No. 10/727,780 filed Dec. 3, 2003. This application is also a continuation-in-part of U.S. patent application Ser. No. 10/922,675 filed Aug. 20, 2004, which is a continuation-in-part of U.S. patent application Ser. No. 10/863,973, filed Jul. 7, 2004, which is a continuation-in-part of International Patent Application No. PCT/US03/04566, filed Feb. 14, 2003. This application also claims the benefit of U.S. Provisional Application No. 60/543,480, filed Feb. 10, 2004. The instant application claims the benefit of all the listed applications, which are hereby incorporated by reference herein in their entireties, including the drawings.

### FIELD OF THE INVENTION

[0002] The present invention relates to compounds, compositions, and methods for the study, diagnosis, and treatment of traits, diseases and conditions that respond to the modulation of vascular endothelial growth factor (VEGF) and/or vascular endothelial growth factor receptor (e.g., VEGFR1, VEGFR2 and/or VEGFR3) gene expression and/or activity. The present invention is also directed to compounds, compositions, and methods relating to traits, diseases and conditions that respond to the modulation of expression and/or activity of genes involved in vascular endothelial growth factor (VEGF) and/or vascular endothelial growth factor receptor (VEGFR) gene expression pathways or other cellular processes that mediate the maintenance or development of such traits, diseases and conditions. Specifically, the invention relates to small nucleic acid molecules, such as short interfering nucleic acid (siNA), short interfering RNA (siRNA), double-stranded RNA (dsRNA), micro-RNA (miRNA), and short hairpin RNA (shRNA) molecules capable of mediating RNA interference (RNAi) against VEGF and VEGFR gene expression.

### BACKGROUND OF THE INVENTION

[0003] The following is a discussion of relevant art pertaining to RNAi. The discussion is provided only for understanding of the invention that follows. The summary is not an admission that any of the work described below is prior art to the claimed invention.

[0004] RNA interference refers to the process of sequence-specific post-transcriptional gene silencing in animals mediated by short interfering RNAs (siRNAs) (Zamore et al., 2000, Cell, 101, 25-33; Fire et al., 1998, Nature, 391, 806; Hamilton et al., 1999, Science, 286, 950-951; Lin et al., 1999, Nature, 402, 128-129; Sharp, 1999, Genes & Dev., 13:139-141; and Strauss, 1999, Science, 286, 886). The corresponding process in plants (Heifetz et al., International PCT Publication No. WO 99/61631) is commonly referred to as post-transcriptional gene silencing or RNA silencing and is also referred to as quelling in fungi. The process of post-transcriptional gene silencing is thought to be an evolutionarily-conserved cellular defense mechanism used to prevent the expression of foreign genes and is commonly shared by diverse flora and phyla (Fire et al., 1999, Trends Genet., 15, 358). Such protection from foreign gene expression may have evolved in response to the production of double-stranded RNAs (dsRNAs) derived from viral infection or from the random integration of transposon elements into a host genome via a cellular response that specifically destroys homologous single-stranded RNA or viral genomic RNA. The presence of dsRNA in cells triggers the RNAi response through a mechanism that has yet to be fully characterized. This mechanism appears to be different from other known mechanisms involving double stranded RNA-specific ribonucleases, such as the interferon response that results from dsRNA-mediated activation of protein kinase PKR and 2′,5′-oligoadenylate synthetase resulting in non-specific cleavage of mRNA by ribonuclease L (see for example U.S. Pat. Nos. 6,107,094; 5,898,031; Clemens et al., 1997, J. Interferon & Cytokine Res., 17, 503-524; Adah et al., 2001, Curr. Med. Chem., 8, 1189).

[0005] The presence of long dsRNAs in cells stimulates the activity of a ribonuclease III enzyme referred to as dicer (Bass, 2000, Cell, 101, 235; Zamore et al., 2000, Cell, 101, 25-33; Hammond et al., 2000, Nature, 404, 293). Dicer is involved in the processing of the dsRNA into short pieces of dsRNA known as short interfering RNAs (siRNAs) (Zamore et al., 2000, Cell, 101, 25-33; Bass, 2000, Cell, 101, 235; Berstein et al., 2001, Nature, 409, 363). Short interfering RNAs derived from dicer activity are typically about 21 to about 23 nucleotides in length and comprise about 19 base pair duplexes (Zamore et al., 2000, Cell, 101, 25-33; Elbashir et al., 2001, Genes Dev., 15, 188). Dicer has also been implicated in the excision of 21- and 22-nucleotide small temporal RNAs (stRNAs) from precursor RNA of conserved structure that are implicated in translational control (Hutvagner et al., 2001, Science, 293, 834). The RNAi response also features an endonuclease complex, commonly referred to as an RNA-induced silencing complex (RISC), which mediates cleavage of single-stranded RNA having sequence complementary to the antisense strand of the siRNA duplex. Cleavage of the target RNA takes place in the middle of the region complementary to the antisense strand of the siRNA duplex (Elbashir et al., 2001, Genes Dev., 15, 188).

[0006] RNAi has been studied in a variety of systems. Fire et al., 1998, Nature, 391, 806, were the first to observe RNAi in C. elegans. Bahramian and Zarbl, 1999, Molecular and Cellular Biology, 19, 274-283 and Wianny and Goetz, 1999, Nature Cell Biol., 2, 70, describe RNAi mediated by dsRNA in mammalian systems. Hammond et al., 2000, Nature, 404, 293, describe RNAi in Drosophila cells transfected with dsRNA. Elbashir et al., 2001, Nature, 411, 494 and Tuschl et al., International PCT Publication No. WO 01/75164, describe RNAi induced by introduction of duplexes of synthetic 21-nucleotide RNAs in cultured mammalian cells including human embryonic kidney and HeLa cells. Recent work in Drosophila embryonic lysates (Elbashir et al., 2001, EMBO J., 20, 6877 and Tuschl et al., International PCT Publication No. WO 01/75164) has revealed certain requirements for siRNA length, structure, chemical composition, and sequence that are essential to mediate efficient RNAi activity. These studies have shown that 2′-nucleotide siRNA duplexes are most active when containing 3′-terminal dinucleotide overhangs. Furthermore, complete substitution of one or both siRNA strands with 2′-deoxy (2′-H) or 2′-O-methyl nucleotides abolishes RNAi activity, whereas substitution of the 3′-terminal siRNA overhang nucleotides with 2′-deoxy nucleotides (2′-H) was shown to be tolerated. Single mismatch sequences in the center of the siRNA duplex were also shown to abolish RNAi activity. In addition, these studies also indicate that the position of the cleavage site in the target RNA is defined by the 5′-end of the siRNA guide sequence rather than the 3′-end of the guide sequence (Elbashir et al., 2001, EMBO J., 20, 6877). Other studies have indicated that a 5′-phosphate on the target-complementary strand of a siRNA duplex is required for siRNA activity and that ATP is utilized to maintain the 5′-phosphate moiety on the siRNA (Nykanen et al., 2001, Cell, 107, 309).

[0007] Studies have shown that replacing the 3′-terminal nucleotide overhanging segments of a 21-mer siRNA duplex having two-nucleotide 3′-overhangs with deoxyribonucleotides does not have an adverse effect on RNAi activity. Replacing up to four nucleotides on each end of the siRNA with deoxyribonucleotides has been reported to be well tolerated, whereas complete substitution with deoxyribonucleotides results in no RNAi activity (Elbashir et al., 2001, EMBO J., 20, 6877 and Tuschl et al., International PCT Publication No. WO 01/75164). In addition, Elbashir et al., supra, also report that substitution of siRNA with 2′-O-methyl nucleotides completely abolishes RNAi activity. Li et al., International PCT Publication No. WO 00/44914, and Beach et al., International PCT Publication No. WO 01/68836 preliminarily suggest that siRNA may include modifications to either the phosphate-sugar backbone or the nucleoside to include at least one of a nitrogen or sulfur heteroatom, however, neither application postulates to what extent such modifications would be tolerated in siRNA molecules, nor provides any further guidance or examples of such modified siRNA. Kreutzer et al., Canadian Patent Application No. 2,359,180, also describe certain chemical modifications for use in dsRNA constructs in order to counteract activation of double-stranded RNA-dependent protein kinase PKR, specifically 2′-amino or 2′-O-methyl nucleotides, and nucleotides containing a 2′-O or 4′-C methylene bridge. However, Kreutzer et al. similarly fails to provide examples or guidance as to what extent these modifications would be tolerated in dsRNA molecules.

[0008] Parrish et al., 2000, Molecular Cell, 6, 1077-1087, tested certain chemical modifications targeting the unc-22 gene in C. elegans using long (>25 nt) siRNA transcripts. The authors describe the introduction of thiophosphate residues into these siRNA transcripts by incorporating thiophosphate nucleotide analogs with T7 and T3 RNA polymerase and observed that RNAs with two phosphorothioate modified bases also had substantial decreases in effectiveness as RNAi. Further, Parrish et al. reported that phosphorothioate modification of more than two residues greatly destabilized the RNAs in vitro such that interference activities could not be assayed. Id. at 1081. The authors also tested certain modifications at the 2′-position of the nucleotide sugar in the long siRNA transcripts and found that substituting deoxynucleotides for ribonucleotides produced a substantial decrease in interference activity, especially in the case of Uridine to Thymidine and/or Cytidine to deoxy-Cytidine substitutions. Id. In addition, the authors tested certain base modifications, including substituting, in sense and antisense strands of the siRNA, 4-thiouracil, 5-bromouracil, 5-iodouracil, and 3-(aminoallyl)uracil for uracil, and inosine for guanosine. Whereas 4-thiouracil and 5-bromouracil substitution appeared to be tolerated, Parrish reported that inosine produced a substantial decrease in interference activity when incorporated in either strand. Parrish also reported that incorporation of 5-iodouracil and 3-(aminoallyl)uracil in the antisense strand resulted in a substantial decrease in RNAi activity as well.

[0009] The use of longer dsRNA has been described. For example, Beach et al., International PCT Publication No. WO 01/68836, describes specific methods for attenuating gene expression using endogenously-derived dsRNA. Tuschl et al., International PCT Publication No. WO 01/75164, describe a Drosophila in vitro RNAi system and the use of specific siRNA molecules for certain functional genomic and certain therapeutic applications; although Tuschl, 2001, Chem. Biochem., 2, 239-245, doubts that RNAi can be used to cure genetic diseases or viral infection due to the danger of activating interferon response. Li et al., International PCT Publication No. WO 00/44914, describe the use of specific long (141 bp-488 bp) enzymatically synthesized or vector expressed dsRNAs for attenuating the expression of certain target genes. Zernicka-Goetz et al., International PCT Publication No. WO 01/36646, describe certain methods for inhibiting the expression of particular genes in mammalian cells using certain long (550 bp-714 bp), enzymatically synthesized or vector expressed dsRNA molecules. Fire et al., International PCT Publication No. WO 99/32619, describe particular methods for introducing certain long dsRNA molecules into cells for use in inhibiting gene expression in nematodes. Plaetinck et al., International PCT Publication No. WO 00/01846, describe certain methods for identifying specific genes responsible for conferring a particular phenotype in a cell using specific long dsRNA molecules. Mello et al., International PCT Publication No. WO 01/29058, describe the identification of specific genes involved in dsRNA-mediated RNAi. Pachuck et al., International PCT Publication No. WO 00/63364, describe certain long (at least 200 nucleotide) dsRNA constructs. Deschamps Depaillette et al., International PCT Publication No. WO 99/07409, describe specific compositions consisting of particular dsRNA molecules combined with certain anti-viral agents. Waterhouse et al., International PCT Publication No. 99/53050 and 1998, PNAS, 95, 13959-13964, describe certain methods for decreasing the phenotypic expression of a nucleic acid in plant cells using certain dsRNAs. Driscoll et al., International PCT Publication No. WO 01/49844, describe specific DNA expression constructs for use in facilitating gene silencing in targeted organisms.

[0010] Others have reported on various RNAi and gene-silencing systems. For example, Parrish et al., 2000, Molecular Cell, 6, 1077-1087, describe specific chemically-modified dsRNA constructs targeting the unc-22 gene of C. elegans. Grossniklaus, International PCT Publication No. WO 01/38551, describes certain methods for regulating polycomb gene expression in plants using certain dsRNAs. Churikov et al., International PCT Publication No. WO 01/42443, describe certain methods for modifying genetic characteristics of an organism using certain dsRNAs. Cogoni et al, International PCT Publication No. WO 01/53475, describe certain methods for isolating a Neurospora silencing gene and uses thereof. Reed et al., International PCT Publication No. WO 01/68836, describe certain methods for gene silencing in plants. Honer et al., International PCT Publication No. WO 01/70944, describe certain methods of drug screening using transgenic nematodes as Parkinson's Disease models using certain dsRNAs. Deak et al., International PCT Publication No. WO 01/72774, describe certain Drosophila-derived gene products that may be related to RNAi in Drosophila. Arndt et al., International PCT Publication No. WO 01/92513 describe certain methods for mediating gene suppression by using factors that enhance RNAi. Tuschl et al., International PCT Publication No. WO 02/44321, describe certain synthetic siRNA constructs. Pachuk et al., International PCT Publication No. WO 00/63364, and Satishchandran et al., International PCT Publication No. WO 01/04313, describe certain methods and compositions for inhibiting the function of certain polynucleotide sequences using certain long (over 250 bp), vector expressed dsRNAs. Echeverri et al., International PCT Publication No. WO 02/38805, describe certain C. elegans genes identified via RNAi. Kreutzer et al., International PCT Publications Nos. WO 02/055692, WO 02/055693, and EP 1144623 B1 describes certain methods for inhibiting gene expression using dsRNA. Graham et al., International PCT Publications Nos. WO 99/49029 and WO 01/70949, and AU 4037501 describe certain vector expressed siRNA molecules. Fire et al., U.S. Pat. No. 6,506,559, describe certain methods for inhibiting gene expression in vitro using certain long dsRNA (299 bp-1033 bp) constructs that mediate RNAi. Martinez et al., 2002, Cell, 110, 563-574, describe certain single stranded siRNA constructs, including certain 5′-phosphorylated single stranded siRNAs that mediate RNA interference in Hela cells. Harborth et al., 2003, Antisense & Nucleic Acid Drug Development, 13, 83-105, describe certain chemically and structurally modified siRNA molecules. Chiu and Rana, 2003, RNA, 9, 1034-1048, describe certain chemically and structurally modified siRNA molecules. Woolf et al., International PCT Publication Nos. WO 03/064626 and WO 03/064625 describe certain chemically modified dsRNA constructs.

### SUMMARY OF THE INVENTION

[0011] This invention relates to compounds, compositions, and methods useful for modulating the expression of genes, such as those genes associated with angiogenesis and proliferation, using short interfering nucleic acid (siNA) molecules. This invention further relates to compounds, compositions, and methods useful for modulating the expression and activity of vascular endothelial growth factor (VEGF) and/or vascular endothelial growth factor receptor (e.g., VEGFR1, VEGFR2, VEGFR3) genes, or genes involved in VEGF and/or VEGFR pathways of gene expression and/or VEGF activity by RNA interference (RNAi) using small nucleic acid molecules. In particular, the instant invention features small nucleic acid molecules, such as short interfering nucleic acid (siNA), short interfering RNA (siRNA), double-stranded RNA (dsRNA), micro-RNA (miRNA), and short hairpin RNA (shRNA) molecules and methods used to modulate the expression of VEGF and/or VEGFR genes and/or other genes involved in VEGF and/or VEGFR mediated angiogenesis in a subject or organism.

[0012] A siNA of the invention can be unmodified or chemically-modified. A siNA of the instant invention can be chemically synthesized, expressed from a vector or enzymatically synthesized. The instant invention also features various chemically-modified synthetic short interfering nucleic acid (siNA) molecules capable of modulating VEGF and/or VEGFR gene expression or activity in cells by RNA interference (RNAi). The use of chemically-modified siNA improves various properties of native siNA molecules through increased resistance to nuclease degradation in vivo and/or through improved cellular uptake. Further, contrary to earlier published studies, siNA having multiple chemical modifications retains its RNAi activity. The siNA molecules of the instant invention provide useful reagents and methods for a variety of therapeutic, veterinary, diagnostic, target validation, genomic discovery, genetic engineering, and pharmacogenomic applications.

[0013] In one embodiment, the invention features one or more siNA molecules and methods that independently or in combination modulate the expression of gene(s) encoding proteins, such as vascular endothelial growth factor (VEGF) and/or vascular endothelial growth factor receptors (e.g., VEGFR1, VEGFR2, VEGFR3), associated with the maintenance and/or development of inflammatory diseases and conditions, respiratory diseases and conditions, allergic diseases and conditions, autoimmune diseases and conditions, neurologic diseases and conditions, ocular diseases and conditions, and cancer and other proliferative diseases and conditions, such as genes encoding sequences comprising those sequences referred to by GenBank Accession Nos. shown in Table I, referred to herein generally as VEGF and/or VEGFR. The description below of the various aspects and embodiments of the invention is provided with reference to the exemplary VEGF and VEGFR (e.g., VEGFR1, VEGFR2, VEGFR3) genes referred to herein as VEGF and VEGFR respectively. However, the various aspects and embodiments are also directed to other VEGF and/or VEGFR genes, such as mutant VEGF and/or VEGFR genes, splice variants of VEGF and/or VEGFR genes, other VEGF and/or VEGFR ligands and receptors. The various aspects and embodiments are also directed to other genes that are involved in VEGF and/or VEGFR mediated pathways of signal transduction or gene expression that are involved in the progression, development, and/or maintenance of disease (e.g., cancer, inflammatory disease, allergic disease, autoimmune disease, ocular disease, or other angiogenesis/neovascularization related diseases and conditions), such as interleukins, including for example IL-4, IL-4 receptor, IL-13, and IL-13 receptor. These additional genes can be analyzed for target sites using the methods described for VEGF and/or VEGFR genes herein. Thus, the modulation of other genes and the effects of such modulation of the other genes can be performed, determined, and measured as described herein.

[0014] In one embodiment, the invention features a double-stranded short interfering nucleic acid (siNA) molecule that down-regulates expression of a vascular endothelial growth factor (e.g., VEGF, VEGF-A, VEGF-B, VEGF-C, VEGF-D) gene, wherein said siNA molecule comprises about 15 to about 28 base pairs.

[0015] In one embodiment, the invention features a double-stranded short interfering nucleic acid (siNA) molecule that down-regulates expression of a vascular endothelial growth factor receptor (e.g., VEGFR1, VEGFR2, and/or VEGFR3) gene, wherein said siNA molecule comprises about 15 to about 28 base pairs.

[0016] In one embodiment, the invention features a double stranded short interfering nucleic acid (siNA) molecule that directs cleavage of a vascular endothelial growth factor (VEGF, e.g., VEGF-A, VEGF-B, VEGF-C, VEGF-D) RNA via RNA interference (RNAi), wherein the double stranded siNA molecule comprises a first and a second strand, each strand of the siNA molecule is about 18 to about 28 nucleotides in length, the first strand of the siNA molecule comprises nucleotide sequence having sufficient complementarity to the VEGF RNA for the siNA molecule to direct cleavage of the VEGF RNA via RNA interference, and the second strand of said siNA molecule comprises nucleotide sequence that is complementary to the first strand.

[0017] In one embodiment, the invention features a double stranded short interfering nucleic acid (siNA) molecule that directs cleavage of a vascular endothelial growth factor receptor (VEGFR, e.g., VEGFR1, VEGFR2, and/or VEGFR3) RNA via RNA interference (RNAi), wherein the double stranded siNA molecule comprises a first and a second strand, each strand of the siNA molecule is about 18 to about 28 nucleotides in length, the first strand of the siNA molecule comprises nucleotide sequence having sufficient complementarity to the VEGFR RNA for the siNA molecule to direct cleavage of the VEGFR RNA via RNA interference, and the second strand of said siNA molecule comprises nucleotide sequence that is complementary to the first strand.

[0018] In one embodiment, the invention features a double stranded short interfering nucleic acid (siNA) molecule that directs cleavage of a VEGF and/or VEGFR RNA via RNA interference (RNAi), wherein the double stranded siNA molecule comprises a first and a second strand, each strand of the siNA molecule is about 18 to about 28 nucleotides in length, the first strand of the siNA molecule comprises nucleotide sequence having sufficient complementarity to the VEGF and/or VEGFR RNA for the siNA molecule to direct cleavage of the VEGF and/or VEGFR RNA via RNA interference, and the second strand of said siNA molecule comprises nucleotide sequence that is complementary to the first strand.

[0019] In one embodiment, the invention features a double stranded short interfering nucleic acid (siNA) molecule that directs cleavage of a VEGF and/or VEGFR RNA via RNA interference (RNAi), wherein the double stranded siNA molecule comprises a first and a second strand, each strand of the siNA molecule is about 18 to about 23 nucleotides in length, the first strand of the siNA molecule comprises nucleotide sequence having sufficient complementarity to the VEGF and/or VEGFR RNA for the siNA molecule to direct cleavage of the VEGF and/or VEGFR RNA via RNA interference, and the second strand of said siNA molecule comprises nucleotide sequence that is complementary to the first strand.

[0020] In one embodiment, the invention features a chemically synthesized double stranded short interfering nucleic acid (siNA) molecule that directs cleavage of a VEGF and/or VEGFR RNA via RNA interference (RNAi), wherein each strand of the siNA molecule is about 18 to about 28 nucleotides in length; and one strand of the siNA molecule comprises nucleotide sequence having sufficient complementarity to the VEGF and/or VEGFR RNA for the siNA molecule to direct cleavage of the VEGF and/or VEGFR RNA via RNA interference.

[0021] In one embodiment, the invention features a chemically synthesized double stranded short interfering nucleic acid (siNA) molecule that directs cleavage of a VEGF and/or VEGFR RNA via RNA interference (RNAi), wherein each strand of the siNA molecule is about 18 to about 23 nucleotides in length; and one strand of the siNA molecule comprises nucleotide sequence having sufficient complementarity to the VEGF and/or VEGFR RNA for the siNA molecule to direct cleavage of the VEGF and/or VEGFR RNA via RNA interference.

[0022] In one embodiment, the invention features a siNA molecule that down-regulates expression of a VEGF and/or VEGFR gene or that directs cleavage of a VEGF and/or VEGFR RNA, for example, wherein the VEGF and/or VEGFR gene or RNA comprises VEGF and/or VEGFR encoding sequence. In one embodiment, the invention features a siNA molecule that down-regulates expression of a VEGF and/or VEGFR gene or that directs cleavage of a VEGF and/or VEGFR RNA, for example, wherein the VEGF and/or VEGFR gene of RNA comprises VEGF and/or VEGFR non-coding sequence or regulatory elements involved in VEGF and/or VEGFR gene expression.

[0023] In one embodiment, a siNA of the invention is used to inhibit the expression of VEGF and/or VEGFR genes or a VEGF and/or VEGFR gene family (e.g., one or more VEGF and/or VEGFR isoforms), wherein the genes or gene family sequences share sequence homology. Such homologous sequences can be identified as is known in the art, for example using sequence alignments. siNA molecules can be designed to target such homologous sequences, for example using perfectly complementary sequences or by incorporating non-canonical base pairs, for example mismatches and/or wobble base pairs, that can provide additional target sequences. In instances where mismatches are identified, non-canonical base pairs (for example, mismatches and/or wobble bases) can be used to generate siNA molecules that target more than one gene sequence. In a non-limiting example, non-canonical base pairs such as UU and CC base pairs are used to generate siNA molecules that are capable of targeting sequences for differing VEGF and/or VEGFR targets that share sequence homology. As such, one advantage of using siNAs of the invention is that a single siNA can be designed to include nucleic acid sequence that is complementary to the nucleotide sequence that is conserved between the homologous genes. In this approach, a single siNA can be used to inhibit expression of more than one gene instead of using more than one siNA molecule to target the different genes.

[0024] In one embodiment, the invention features a siNA molecule having RNAi activity against VEGF and/or VEGFR RNA, wherein the siNA molecule comprises a sequence complementary to any RNA having VEGF and/or VEGFR encoding sequence, such as those sequences having GenBank Accession Nos. shown in Table I. In another embodiment, the invention features a siNA molecule having RNAi activity against VEGF and/or VEGFR RNA, wherein the siNA molecule comprises a sequence complementary to an RNA having variant VEGF and/or VEGFR encoding sequence, for example other mutant VEGF and/or VEGFR genes not shown in Table I but known in the art to be associated with, for example, the maintenance and/or development of, for example, angiogenesis, cancer, proliferative disease, ocular disease, and/or renal disease. Chemical modifications as shown in Tables III and IV or otherwise described herein can be applied to any siNA construct of the invention. In another embodiment, a siNA molecule of the invention includes a nucleotide sequence that can interact with nucleotide sequence of a VEGF and/or VEGFR gene and thereby mediate silencing of VEGF and/or VEGFR gene expression, for example, wherein the siNA mediates regulation of VEGF and/or VEGFR gene expression by cellular processes that modulate the transcription or translation of the VEGF and/or VEGFR gene and prevent expression of the VEGF and/or VEGFR gene.

[0025] In one embodiment, the invention features a siNA molecule having RNAi activity against VEGF and/or VEGFR RNA, wherein the siNA molecule comprises a sequence complementary to any RNA having VEGF and/or VEGFR encoding sequence, such as those sequences having VEGF and/or VEGFR GenBank Accession Nos. shown in Table I. In another embodiment, the invention features a siNA molecule having RNAi activity against VEGF and/or VEGFR RNA, wherein the siNA molecule comprises a sequence complementary to an RNA having other VEGF and/or VEGFR encoding sequence, for example, mutant VEGF and/or VEGFR genes, splice variants of VEGF and/or VEGFR genes, VEGF and/or VEGFR variants with conservative substitutions, and homologous VEGF and/or VEGFR ligands and receptors. Chemical modifications as shown in Tables III and IV or otherwise described herein can be applied to any siNA construct of the invention.

[0026] In one embodiment, siNA molecules of the invention are used to down regulate or inhibit the expression of proteins arising from VEGF and/or VEGFR haplotype polymorphisms that are associated with a trait, disease or condition. Analysis of genes, or protein or RNA levels can be used to identify subjects with such polymorphisms or those subjects who are at risk of developing traits, conditions, or diseases described herein (see for example Silvestri et al., 2003, Int J Cancer., 104, 310-7). These subjects are amenable to treatment, for example, treatment with siNA molecules of the invention and any other composition useful in treating diseases related to VEGF and/or VEGFR gene expression. As such, analysis of VEGF and/or VEGFR protein or RNA levels can be used to determine treatment type and the course of therapy in treating a subject. Monitoring of VEGF and/or VEGFR protein or RNA levels can be used to predict treatment outcome and to determine the efficacy of compounds and compositions that modulate the level and/or activity of certain VEGF and/or VEGFR proteins associated with a trait, condition, or disease.

[0027] In one embodiment, siNA molecules of the invention are used to down regulate or inhibit the expression of soluble VEGF receptors (e.g. sVEGFR1 or sVEGFR2). Analysis of soluble VEGF receptor levels can be used to identify subjects with certain cancer types. These cancers can be amenable to treatment, for example, treatment with siNA molecules of the invention and any other chemotherapeutic composition. As such, analysis of soluble VEGF receptor levels can be used to determine treatment type and the course of therapy in treating a subject. Monitoring of soluble VEGF receptor levels can be used to predict treatment outcome and to determine the efficacy of compounds and compositions that modulate the level and/or activity of VEGF receptors (see for example Pavco U.S. Ser. No. 10/438,493, incorporated by reference herein in its entirety including the drawings).

[0028] In one embodiment of the invention a siNA molecule comprises an antisense strand comprising a nucleotide sequence that is complementary to a nucleotide sequence or a portion thereof encoding a VEGF and/or VEGFR protein. The siNA further comprises a sense strand, wherein said sense strand comprises a nucleotide sequence of a VEGF and/or VEGFR gene or a portion thereof.

[0029] In another embodiment, a siNA molecule comprises an antisense region comprising a nucleotide sequence that is complementary to a nucleotide sequence encoding a VEGF and/or VEGFR protein or a portion thereof. The siNA molecule further comprises a sense region, wherein said sense region comprises a nucleotide sequence of a VEGF and/or VEGFR gene or a portion thereof.

[0030] In another embodiment, the invention features a siNA molecule comprising a nucleotide sequence in the antisense region of the siNA molecule that is complementary to a nucleotide sequence or portion of sequence of a VEGF and/or VEGFR gene. In another embodiment, the invention features a siNA molecule comprising a region, for example, the antisense region of the siNA construct, complementary to a sequence comprising a VEGF and/or VEGFR gene sequence or a portion thereof.

[0031] In another embodiment, the invention features a siNA molecule comprising nucleotide sequence, for example, nucleotide sequence in the antisense region of the siNA molecule that is complementary to a nucleotide sequence or portion of sequence of a VEGF and/or VEGFR gene. In another embodiment, the invention features a siNA molecule comprising a region, for example, the antisense region of the siNA construct, complementary to a sequence comprising a VEGF and/or VEGFR gene sequence or a portion thereof.

[0032] In one embodiment, the antisense region of siNA constructs comprises a sequence complementary to sequence having any of target SEQ ID NOs. shown in Tables II and III. In one embodiment, the antisense region of siNA constructs of the invention constructs comprises sequence having any of antisense SEQ ID NOs. in Tables II and III and FIGS. 4 and 5. In another embodiment, the sense region of siNA constructs of the invention comprises sequence having any of sense SEQ ID NOs. in Tables II and III and FIGS. 4 and 5.

[0033] In one embodiment, a siNA molecule of the invention comprises any of SEQ ID NOs. 1-4248. The sequences shown in SEQ ID NOs: 1-4248 are not limiting. A siNA molecule of the invention can comprise any contiguous VEGF and/or VEGFR sequence (e.g., about 15 to about 25 or more, or about 15, 16, 17, 18, 19, 20, 21, 22, 23, 24, or 25 or more contiguous VEGF and/or VEGFR nucleotides).

[0034] In yet another embodiment, the invention features a siNA molecule comprising a sequence, for example, the antisense sequence of the siNA construct, complementary to a sequence or portion of sequence comprising sequence represented by GenBank Accession Nos. shown in Table I. Chemical modifications in Tables III and IV and described herein can be applied to any siNA construct of the invention.

[0035] In one embodiment of the invention a siNA molecule comprises an antisense strand having about 15 to about 30 (e.g., about 15, 16, 17, 18, 19, 20, 21, 22, 23, 24, 25, 26, 27, 28, 29, or 30) nucleotides, wherein the antisense strand is complementary to a RNA sequence or a portion thereof encoding VEGF and/or VEGFR, and wherein said siNA further comprises a sense strand having about 15 to about 30 (e.g., about 15, 16, 17, 18, 19, 20, 21, 22, 23, 24, 25, 26, 27, 28, 29, or 30) nucleotides, and wherein said sense strand and said antisense strand are distinct nucleotide sequences where at least about 15 nucleotides in each strand are complementary to the other strand.

[0036] In another embodiment of the invention a siNA molecule of the invention comprises an antisense region having about 15 to about 30 (e.g., about 15, 16, 17, 18, 19, 20, 21, 22, 23, 24, 25, 26, 27, 28, 29, or 30) nucleotides, wherein the antisense region is complementary to a RNA sequence encoding VEGF and/or VEGFR, and wherein said siNA further comprises a sense region having about 15 to about 30 (e.g., about 15, 16, 17, 18, 19, 20, 21, 22, 23, 24, 25, 26, 27, 28, 29, or 30) nucleotides, wherein said sense region and said antisense region are comprised in a linear molecule where the sense region comprises at, least about 15 nucleotides that are complementary to the antisense region.

[0037] In one embodiment, a siNA molecule of the invention has RNAi activity that modulates expression of RNA encoded by a VEGF and/or VEGFR gene. Because VEGF and/or VEGFR genes can share some degree of sequence homology with each other, siNA molecules can be designed to target a class of VEGF and/or VEGFR genes or alternately specific VEGF and/or VEGFR genes (e.g., polymorphic variants) by selecting sequences that are either shared amongst different VEGF and/or VEGFR targets or alternatively that are unique for a specific VEGF and/or VEGFR target. Therefore, in one embodiment, the siNA molecule can be designed to target conserved regions of VEGF and/or VEGFR RNA sequence having homology between several VEGF and/or VEGFR gene variants so as to target a class of VEGF and/or VEGFR genes with one siNA molecule. Accordingly, in one embodiment, the siNA molecule of the invention modulates the expression of one or both VEGF and/or VEGFR alleles in a subject. In another embodiment, the siNA molecule can be designed to target a sequence that is unique to a specific VEGF and/or VEGFR RNA sequence (e.g., a single VEGF and/or VEGFR allele or VEGF and/or VEGFR single nucleotide polymorphism (SNP)) due to the high degree of specificity that the siNA molecule requires to mediate RNAi activity.

[0038] In one embodiment, a siNA molecule of the invention has RNAi activity that modulates expression of RNA encoded by a VEGFR gene. Because VEGFR genes can share some degree of sequence homology with each other, siNA molecules can be designed to target a class of VEGFR genes (and associated receptor or ligand genes) or alternately specific VEGFR genes by selecting sequences that are either shared amongst different VEGFR targets or alternatively that are unique for a specific VEGFR target. Therefore, in one embodiment, the siNA molecule can be designed to target conserved regions of VEGFR RNA sequence having homology between several VEGFR genes so as to target several VEGFR genes (e.g., VEGFR1, VEGFR2 and/or VEGFR3, different VEGFR isoforms, splice variants, mutant genes etc.) with one siNA molecule. In one embodiment, the siNA molecule can be designed to target conserved regions of VEGFR1 and VEGFR2 RNA sequence having shared sequence homology (see for example Table III). Accordingly, in one embodiment, the siNA molecule of the invention modulates the expression of more than one VEGFR gene, i.e., VEGFR1, VEGFR2, and VEGFR3, or any combination thereof. In another embodiment, the siNA molecule can be designed to target a sequence that is unique to a specific VEGFR RNA sequence due to the high degree of specificity that the siNA molecule requires to mediate RNAi activity.

[0039] In one embodiment, a siNA molecule of the invention has RNAi activity that modulates expression of RNA encoded by a VEGF gene. Because VEGF genes can share some degree of sequence homology with each other, siNA molecules can be designed to target a class of VEGF genes (and associated receptor or ligand genes) or alternately specific VEGF genes by selecting sequences that are either shared amongst different VEGF targets or alternatively that are unique for a specific VEGF target. Therefore, in one embodiment, the siNA molecule can be designed to target conserved regions of VEGF RNA sequence having homology between several VEGF genes so as to target several VEGF genes (e.g., VEGF-A, VEGF-B, VEGF-C and/or VEGF-D, different VEGF isoforms, splice variants, mutant genes etc.) with one siNA molecule. Accordingly, in one embodiment, the siNA molecule of the invention modulates the expression of more than one VEGF gene, i.e., VEGF-A, VEGF-B, VRGF-C, and VEGF-D or any combination thereof. In another embodiment, the siNA molecule can be designed to target a sequence that is unique to a specific VEGF RNA sequence due to the high degree of specificity that the siNA molecule requires to mediate RNAi activity.

[0040] In one embodiment, a siNA molecule of the invention targeting one or more VEGF receptor genes (e.g., VEGFR1, VEGFR2, and/or VEGFR3) is used in combination with a siNA molecule of the invention targeting a VEGF gene (e.g., VEGF-A, VEGF-B, VEGF-C and/or VEGF-D) according to a use described herein, such as treating a subject with an angiogenesis or neovascularization related disease, such as tumor angiogenesis and cancer, including but not limited to breast cancer, lung cancer (including non-small cell lung carcinoma), prostate cancer, colorectal cancer, brain cancer, esophageal cancer, bladder cancer, pancreatic cancer, cervical cancer, head and neck cancer, skin cancers, nasopharyngeal carcinoma, liposarcoma, epithelial carcinoma, renal cell carcinoma, gallbladder adeno carcinoma, parotid adenocarcinoma, ovarian cancer, melanoma, lymphoma, glioma, endometrial sarcoma, multidrug resistant cancers, diabetic retinopathy, macular degeneration, neovascular glaucoma, myopic degeneration, arthritis, psoriasis, endometriosis, female reproduction, verruca vulgaris, angiofibroma of tuberous sclerosis, pot-wine stains, Sturge Weber syndrome, Kippel-Trenaunay-Weber syndrome, Osler-Weber-Rendu syndrome; renal disease such as Autosomal dominant polycystic kidney disease (ADPKD); inflammatory disease; respiratory disease such as asthma or COPD; neurologic disease; allergic disease such as allergic rhinitis; autoimmune disease; and any other diseases or conditions that are related to or will respond to the levels of VEGF, VEGFR1, and VEGFR2 in a cell or tissue, alone or in combination with other therapies.

[0041] In another embodiment, a siNA molecule of the invention that targets homologous VEGFR1 and VEGFR2 sequence is used in combination with a siNA molecule that targets VEGF-A according to a use described herein, such as treating a subject with an angiogenesis or neovascularization related disease such as tumor angiogenesis and cancer, including but not limited to breast cancer, lung cancer (including non-small cell lung carcinoma), prostate cancer, colorectal cancer, brain cancer, esophageal cancer, bladder cancer, pancreatic cancer, cervical cancer, head and neck cancer, skin cancers, nasopharyngeal carcinoma, liposarcoma, epithelial carcinoma, renal cell carcinoma, gallbladder adeno carcinoma, parotid adenocarcinoma, ovarian cancer, melanoma, lymphoma, glioma, endometrial sarcoma, multidrug resistant cancers, diabetic retinopathy, macular degeneration, neovascular glaucoma, myopic degeneration, arthritis, psoriasis, endometriosis, female reproduction, verruca vulgaris, angiofibroma of tuberous sclerosis, pot-wine stains, Sturge Weber syndrome, Kippel-Trenaunay-Weber syndrome, Osler-Weber-Rendu syndrome, renal disease such as Autosomal dominant polycystic kidney disease (ADPKD); inflammatory disease; respiratory disease such as asthma or COPD; neurologic disease; allergic disease such as allergic rhinitis; autoimmune disease; and any other diseases or conditions that are related to or will respond to the levels of VEGF, VEGFR1, and VEGFR2 in a cell or tissue, alone or in combination with other therapies.

[0042] In one embodiment, a siNA of the invention is used to inhibit the expression of VEGFR1, VEGFR2, and/or VEGFR3 genes, wherein the VEGFR1, VEGFR2, and/or VEGFR3 sequences share sequence homology. Such homologous sequences can be identified as is known in the art, for example using sequence alignments. siNA molecules can be designed to target such homologous sequences, for example using perfectly complementary sequences or by incorporating non-canonical base pairs, for example mismatches and/or wobble base pairs, that can provide additional target sequences. Non limiting examples of sequence alignments between VEGFR1 and VEGFR2 are shown in Table III. In instances where mismatches are shown, non-canonical base pairs, for example mismatches and/or wobble bases, can be used to generate siNA molecules that target both VEGFR1 and VEGFR2 RNA sequences. In a non-limiting example, non-canonical base pairs such as UU and CC base pairs are used to generate siNA molecules that are capable of targeting differing VEGF and/or VEGFR sequences (e.g. VEGFR1 and VEGFR2). As such, one advantage of using siNAs of the invention is that a single siNA can be designed to include nucleic acid sequence that is complementary to the nucleotide sequence that is conserved between the VEGF receptors (i.e., VEGFR1, VEGFR2, and/or VEGFR3) such that the siNA can interact with RNAs of the receptors and mediate RNAi to achieve inhibition of expression of the VEGF receptors. In this approach, a single siNA can be used to inhibit expression of more than one VEGF receptor instead of using more than one siNA molecule to target the different receptors.

[0043] In one embodiment, the invention features a method of designing a single siNA to inhibit the expression of both VEGFR1 and VEGFR2 genes comprising designing an siNA having nucleotide sequence that is complementary to nucleotide sequence encoded by or present in both VEGFR1 and VEGFR2 genes or a portion thereof, wherein the siNA mediates RNAi to inhibit the expression of both VEGFR1 and VEGFR2 genes. For example, a single siNA can inhibit the expression of two genes by binding to conserved or homologous sequence present in RNA encoded by VEGFR1 and VEGFR2 genes or a portion thereof.

[0044] In one embodiment, the invention features a method of designing a single siNA to inhibit the expression of both VEGFR1 and VEGFR3 genes comprising designing an siNA having nucleotide sequence that is complementary to nucleotide sequence encoded by or present in both VEGFR1 and VEGFR3 genes or a portion thereof, wherein the siNA mediates RNAi to inhibit the expression of both VEGFR1 and VEGFR3 genes. For example, a single siNA can inhibit the expression of two genes by binding to conserved or homologous sequence present in RNA encoded by VEGFR1 and VEGFR3 genes or a portion thereof.

[0045] In one embodiment, the invention features a method of designing a single siNA to inhibit the expression of both VEGFR2 and VEGFR3 genes comprising designing an siNA having nucleotide sequence that is complementary to nucleotide sequence encoded by or present in both VEGFR2 and VEGFR3 genes or a portion thereof, wherein the siNA mediates RNAi to inhibit the expression of both VEGFR2 and VEGFR3 genes. For example, a single siNA can inhibit the expression of two genes by binding to conserved or homologous sequence present in RNA encoded by VEGFR2 and VEGFR3 genes or a portion thereof.

[0046] In one embodiment, the invention features a method of designing a single siNA to inhibit the expression of VEGFR1, VEGFR2 and VEGFR3 genes comprising designing an siNA having nucleotide sequence that is complementary to nucleotide sequence encoded by or present in VEGFR1, VEGFR2 and VEGFR3 genes or a portion thereof, wherein the siNA mediates RNAi to inhibit the expression of VEGFR1, VEGFR2 and VEGFR3 genes. For example, a single siNA can inhibit the expression of two genes by binding to conserved or homologous sequence present in RNA encoded by VEGFR1, VEGFR2 and VEGFR3 genes or a portion thereof.

[0047] In one embodiment, nucleic acid molecules of the invention that act as mediators of the RNA interference gene silencing response are double-stranded nucleic acid molecules. In another embodiment, the siNA molecules of the invention consist of duplex nucleic acid molecules containing about 15 to about 30 base pairs between oligonucleotides comprising about 15 to about 30 (e.g., about 15, 16, 17, 18, 19, 20, 21, 22, 23, 24, 25, 26, 27, 28, 29, or 30) nucleotides. In yet another embodiment, siNA molecules of the invention comprise duplex nucleic acid molecules with overhanging ends of about 1 to about 3 (e.g., about 1, 2, or 3) nucleotides, for example, about 21-nucleotide duplexes with about 19 base pairs and 3′-terminal mononucleotide, dinucleotide, or trinucleotide overhangs. In yet another embodiment, siNA molecules of the invention comprise duplex nucleic acid molecules with blunt ends, where both ends are blunt, or alternatively, where one of the ends is blunt.

[0048] In one embodiment, the invention features one or more chemically-modified siNA constructs having specificity for VEGF and/or VEGFR expressing nucleic acid molecules, such as RNA encoding a VEGF and/or VEGFR protein or non-coding RNA associated with the expression of VEGF and/or VEGFR genes. In one embodiment, the invention features a RNA based siNA molecule (e.g., a siNA comprising 2′-OH nucleotides) having specificity for VEGF and/or VEGFR expressing nucleic acid molecules that includes one or more chemical modifications described herein. Non-limiting examples of such chemical modifications include without limitation phosphorothioate internucleotide linkages, 2′-deoxyribonucleotides, 2′-O-methyl ribonucleotides, 2′-deoxy-2′-fluoro ribonucleotides, 2′-O-trifluoromethyl nucleotides, 2′-O-ethyl-trifluoromethoxy nucleotides, 2′-O-difluoromethoxy-ethoxy nucleotides, “universal base” nucleotides, “acyclic” nucleotides, 5-C-methyl nucleotides, and terminal glyceryl and/or inverted deoxy abasic residue incorporation. These chemical modifications, when used in various siNA constructs, (e.g., RNA based siNA constructs), are shown to preserve RNAi activity in cells while at the same time, dramatically increasing the serum stability of these compounds. Furthermore, contrary to the data published by Parrish et al., supra, applicant demonstrates that multiple (greater than one) phosphorothioate substitutions are well-tolerated and confer substantial increases in serum stability for modified siNA constructs.

[0049] In one embodiment, a siNA molecule of the invention comprises modified nucleotides while maintaining the ability to mediate RNAi. The modified nucleotides can be used to improve in vitro or in vivo characteristics such as stability, activity, and/or bioavailability. For example, a siNA molecule of the invention can comprise modified nucleotides as a percentage of the total number of nucleotides present in the siNA molecule. As such, a siNA molecule of the invention can generally comprise about 5% to about 100% modified nucleotides (e.g., about 5%, 10%, 15%, 20%, 25%, 30%, 35%, 40%, 45%, 50%, 55%, 60%, 65%, 70%, 75%, 80%, 85%, 90%, 95% or 100% modified nucleotides). The actual percentage of modified nucleotides present in a given siNA molecule will depend on the total number of nucleotides present in the siNA. If the siNA molecule is single stranded, the percent modification can be based upon the total number of nucleotides present in the single stranded siNA molecules. Likewise, if the siNA molecule is double stranded, the percent modification can be based upon the total number of nucleotides present in the sense strand, antisense strand, or both the sense and antisense strands.

[0050] One aspect of the invention features a double-stranded short interfering nucleic acid (siNA) molecule that down-regulates expression of a VEGF and/or VEGFR gene or that directs cleavage of a VEGF and/or VEGFR RNA. In one embodiment, the double stranded siNA molecule comprises one or more chemical modifications and each strand of the double-stranded siNA is about 21 nucleotides long. In one embodiment, the double-stranded siNA molecule does not contain any ribonucleotides. In another embodiment, the double-stranded siNA molecule comprises one or more ribonucleotides. In one embodiment, each strand of the double-stranded siNA molecule independently comprises about 15 to about 30 (e.g., about 15, 16, 17, 18, 19, 20, 21, 22, 23, 24, 25, 26, 27, 28, 29, or 30) nucleotides, wherein each strand comprises about 15 to about 30 (e.g., about 15, 16, 17, 18, 19, 20, 21, 22, 23, 24, 25, 26, 27, 28, 29, or 30) nucleotides that are complementary to the nucleotides of the other strand. In one embodiment, one of the strands of the double-stranded siNA molecule comprises a nucleotide sequence that is complementary to a nucleotide sequence or a portion thereof of the VEGF and/or VEGFR gene, and the second strand of the double-stranded siNA molecule comprises a nucleotide sequence substantially similar to the nucleotide sequence of the VEGF and/or VEGFR gene or a portion thereof.

[0051] In another embodiment, the invention features a double-stranded short interfering nucleic acid (siNA) molecule that down-regulates expression of a VEGF and/or VEGFR gene or that directs cleavage of a VEGF and/or VEGFR RNA, comprising an antisense region, wherein the antisense region comprises a nucleotide sequence that is complementary to a nucleotide sequence of the VEGF and/or VEGFR gene or a portion thereof, and a sense region, wherein the sense region comprises a nucleotide sequence substantially similar to the nucleotide sequence of the VEGF and/or VEGFR gene or a portion thereof. In one embodiment, the antisense region and the sense region independently comprise about 15 to about 30 (e.g. about 15, 16, 17, 18, 19, 20, 21, 22, 23, 24, 25, 26, 27, 28, 29, or 30) nucleotides, wherein the antisense region comprises about 15 to about 30 (e.g. about 15, 16, 17, 18, 19, 20, 21, 22, 23, 24, 25, 26, 27, 28, 29, or 30) nucleotides that are complementary to nucleotides of the sense region.

[0052] In another embodiment, the invention features a double-stranded short interfering nucleic acid (siNA) molecule that down-regulates expression of a VEGF and/or VEGFR gene or that directs cleavage of a VEGF and/or VEGFR RNA, comprising a sense region and an antisense region, wherein the antisense region comprises a nucleotide sequence that is complementary to a nucleotide sequence of RNA encoded by the VEGF and/or VEGFR gene or a portion thereof and the sense region comprises a nucleotide sequence that is complementary to the antisense region.

[0053] In one embodiment, a siNA molecule of the invention comprises blunt ends, i.e., ends that do not include any overhanging nucleotides. For example, a siNA molecule comprising modifications described herein (e.g., comprising nucleotides having Formulae I-VII or siNA constructs comprising “Stab 00”-“Stab 34” (Table IV) or any combination thereof (see Table IV)) and/or any length described herein can comprise blunt ends or ends with no overhanging nucleotides.

[0054] In one embodiment, any siNA molecule of the invention can comprise one or more blunt ends, i.e. where a blunt end does not have any overhanging nucleotides. In one embodiment, the blunt ended siNA molecule has a number of base pairs equal to the number of nucleotides present in each strand of the siNA molecule. In another embodiment, the siNA molecule comprises one blunt end, for example wherein the 5′-end of the antisense strand and the 3′-end of the sense strand do not have any overhanging nucleotides. In another example, the siNA molecule comprises one blunt end, for example wherein the 3′-end of the antisense strand and the 5′-end of the sense strand do not have any overhanging nucleotides. In another example, a siNA molecule comprises two blunt ends, for example wherein the 3′-end of the antisense strand and the 5′-end of the sense strand as well as the 5′-end of the antisense strand and 3′-end of the sense strand do not have any overhanging nucleotides. A blunt ended siNA molecule can comprise, for example, from about 15 to about 30 nucleotides (e.g., about 15, 16, 17, 18, 19, 20, 21, 22, 23, 24, 25, 26, 27, 28, 29, or 30 nucleotides). Other nucleotides present in a blunt ended siNA molecule can comprise, for example, mismatches, bulges, loops, or wobble base pairs to modulate the activity of the siNA molecule to mediate RNA interference.

[0055] By “blunt ends” is meant symmetric termini or termini of a double stranded siNA molecule having no overhanging nucleotides. The two strands of a double stranded siNA molecule align with each other without over-hanging nucleotides at the termini. For example, a blunt ended siNA construct comprises terminal nucleotides that are complementary between the sense and antisense regions of the siNA molecule.

[0056] In one embodiment, the invention features a double-stranded short interfering nucleic acid (siNA) molecule that down-regulates expression of a VEGF and/or VEGFR gene or that directs cleavage of a VEGF and/or VEGFR RNA, wherein the siNA molecule is assembled from two separate oligonucleotide fragments wherein one fragment comprises the sense region and the second fragment comprises the antisense region of the siNA molecule. The sense region can be connected to the antisense region via a linker molecule, such as a polynucleotide linker or a non-nucleotide linker.

[0057] In one embodiment, the invention features double-stranded short interfering nucleic acid (siNA) molecule that down-regulates expression of a VEGF and/or VEGFR gene or that directs cleavage of a VEGF and/or VEGFR RNA, wherein the siNA molecule comprises about 15 to about 30 (e.g. about 15, 16, 17, 18, 19, 20, 21, 22, 23, 24, 25, 26, 27, 28, 29, or 30) base pairs, and wherein each strand of the siNA molecule comprises one or more chemical modifications. In another embodiment, one of the strands of the double-stranded siNA molecule comprises a nucleotide sequence that is complementary to a nucleotide sequence of a VEGF and/or VEGFR gene or a portion thereof, and the second strand of the double-stranded siNA molecule comprises a nucleotide sequence substantially similar to the nucleotide sequence or a portion thereof of the VEGF and/or VEGFR gene. In another embodiment, one of the strands of the double-stranded siNA molecule comprises a nucleotide sequence that is complementary to a nucleotide sequence of a VEGF and/or VEGFR gene or portion thereof, and the second strand of the double-stranded siNA molecule comprises a nucleotide sequence substantially similar to the nucleotide sequence or portion thereof of the VEGF and/or VEGFR gene. In another embodiment, each strand of the siNA molecule comprises about 15 to about 30 (e.g. about 15, 16, 17, 18, 19, 20, 21, 22, 23, 24, 25, 26, 27, 28, 29, or 30) nucleotides, and each strand comprises at least about 15 to about 30 (e.g. about 15, 16, 17, 18, 19, 20, 21, 22, 23, 24, 25, 26, 27, 28, 29, or 30) nucleotides that are complementary to the nucleotides of the other strand. The VEGF and/or VEGFR gene can comprise, for example, sequences referred to in Table I.

[0058] In one embodiment, a siNA molecule of the invention comprises no ribonucleotides. In another embodiment, a siNA molecule of the invention comprises ribonucleotides.

[0059] In one embodiment, a siNA molecule of the invention comprises an antisense region comprising a nucleotide sequence that is complementary to a nucleotide sequence of a VEGF and/or VEGFR gene or a portion thereof, and the siNA further comprises a sense region comprising a nucleotide sequence substantially similar to the nucleotide sequence of the VEGF and/or VEGFR gene or a portion thereof. In another embodiment, the antisense region and the sense region each comprise about 15 to about 30 (e.g. about 15, 16, 17, 18, 19, 20, 21, 22, 23, 24, 25, 26, 27, 28, 29, or 30) nucleotides and the antisense region comprises at least about 15 to about 30 (e.g. about 15, 16, 17, 18, 19, 20, 21, 22, 23, 24, 25, 26, 27, 28, 29, or 30) nucleotides that are complementary to nucleotides of the sense region. The VEGF and/or VEGFR gene can comprise, for example, sequences referred to in Table I. In another embodiment, the siNA is a double stranded nucleic acid molecule, where each of the two strands of the siNA molecule independently comprise about 15 to about 40 (e.g. about 15, 16, 17, 18, 19, 20, 21, 22, 23, 24, 25, 26, 27, 28, 29, 30, 31, 23, 33, 34, 35, 36, 37, 38, 39, or 40) nucleotides, and where one of the strands of the siNA molecule comprises at least about 15 (e.g. about 15, 16, 17, 18, 19, 20, 21, 22, 23, 24 or 25 or more) nucleotides that are complementary to the nucleic acid sequence of the VEGF and/or VEGFR gene or a portion thereof.

[0060] In one embodiment, a siNA molecule of the invention comprises a sense region and an antisense region, wherein the antisense region comprises a nucleotide sequence that is complementary to a nucleotide sequence of RNA encoded by a VEGF and/or VEGFR gene, or a portion thereof, and the sense region comprises a nucleotide sequence that is complementary to the antisense region. In one embodiment, the siNA molecule is assembled from two separate oligonucleotide fragments, wherein one fragment comprises the sense region and the second fragment comprises the antisense region of the siNA molecule. In another embodiment, the sense region is connected to the antisense region via a linker molecule. In another embodiment, the sense region is connected to the antisense region via a linker molecule, such as a nucleotide or non-nucleotide linker. The VEGF and/or VEGFR gene can comprise, for example, sequences referred in to Table I.

[0061] In one embodiment, the invention features a double-stranded short interfering nucleic acid (siNA) molecule that down-regulates expression of a VEGF and/or VEGFR gene or that directs cleavage of a VEGF and/or VEGFR RNA, comprising a sense region and an antisense region, wherein the antisense region comprises a nucleotide sequence that is complementary to a nucleotide sequence of RNA encoded by the VEGF and/or VEGFR gene or a portion thereof and the sense region comprises a nucleotide sequence that is complementary to the antisense region, and wherein the siNA molecule has one or more modified pyrimidine and/or purine nucleotides. In one embodiment, the pyrimidine nucleotides in the sense region are 2′-O-methylpyrimidine nucleotides or 2′-deoxy-2′-fluoro pyrimidine nucleotides and the purine nucleotides present in the sense region are 2′-deoxy purine nucleotides. In another embodiment, the pyrimidine nucleotides in the sense region are 2′-deoxy-2′-fluoro pyrimidine nucleotides and the purine nucleotides present in the sense region are 2′-O-methyl purine nucleotides. In another embodiment, the pyrimidine nucleotides in the sense region are 2′-deoxy-2′-fluoro pyrimidine nucleotides and the purine nucleotides present in the sense region are 2′-deoxy purine nucleotides. In one embodiment, the pyrimidine nucleotides in the antisense region are 2′-deoxy-2′-fluoro pyrimidine nucleotides and the purine nucleotides present in the antisense region are 2′-O-methyl or 2′-deoxy purine nucleotides. In another embodiment of any of the above-described siNA molecules, any nucleotides present in a non-complementary region of the sense strand (e.g. overhang region) are 2′-deoxy nucleotides.

[0062] In one embodiment, the invention features a double-stranded short interfering nucleic acid (siNA) molecule that down-regulates expression of a VEGF and/or VEGFR gene or that directs cleavage of a VEGF and/or VEGFR RNA, wherein the siNA molecule is assembled from two separate oligonucleotide fragments wherein one fragment comprises the sense region and the second fragment comprises the antisense region of the siNA molecule, and wherein the fragment comprising the sense region includes a terminal cap moiety at the 5′-end, the 3′-end, or both of the 5′ and 3′ ends of the fragment. In one embodiment, the terminal cap moiety is an inverted deoxy abasic moiety or glyceryl moiety. In one embodiment, each of the two fragments of the siNA molecule independently comprise about 15 to about 30 (e.g. about 15, 16, 17, 18, 19, 20, 21, 22, 23, 24, 25, 26, 27, 28, 29, or 30) nucleotides. In another embodiment, each of the two fragments of the siNA molecule independently comprise about 15 to about 40 (e.g. about 15, 16, 17, 18, 19, 20, 21, 22, 23, 24, 25, 26, 27, 28, 29, 30, 31, 23, 33, 34, 35, 36, 37, 38, 39, or 40) nucleotides. In a non-limiting example, each of the two fragments of the siNA molecule comprise about 21 nucleotides.

[0063] In one embodiment, the invention features a siNA molecule comprising at least one modified nucleotide, wherein the modified nucleotide is a 2′-deoxy-2′-fluoro nucleotide, 2′-O-trifluoromethyl nucleotide, 2′-O-ethyl-trifluoromethoxy nucleotide, or 2′-O-difluoromethoxy-ethoxy nucleotide. The siNA can be, for example, about 15 to about 40 nucleotides in length. In one embodiment, all pyrimidine nucleotides present in the siNA are 2′-deoxy-2′-fluoro, 2′-O-trifluoromethyl, 2′-O-ethyl-trifluoromethoxy, or 2′-O-difluoromethoxy-ethoxy, 4′-thio pyrimidine nucleotides. In one embodiment, the modified nucleotides in the siNA include at least one 2′-deoxy-2′-fluoro cytidine or 2′-deoxy-2′-fluoro uridine nucleotide. In another embodiment, the modified nucleotides in the siNA include at least one 2′-fluoro cytidine and at least one 2′-deoxy-2′-fluoro uridine nucleotides. In one embodiment, all uridine nucleotides present in the siNA are 2′-deoxy-2′-fluoro uridine nucleotides. In one embodiment, all cytidine nucleotides present in the siNA are 2′-deoxy-2′-fluoro cytidine nucleotides. In one embodiment, all adenosine nucleotides present in the siNA are 2′-deoxy-2′-fluoro adenosine nucleotides. In one embodiment, all guanosine nucleotides present in the siNA are 2′-deoxy-2′-fluoro guanosine nucleotides. The siNA can further comprise at least one modified internucleotidic linkage, such as phosphorothioate linkage. In one embodiment, the 2′-deoxy-2′-fluoronucleotides are present at specifically selected locations in the siNA that are sensitive to cleavage by ribonucleases, such as locations having pyrimidine nucleotides.

[0064] In one embodiment, the invention features a method of increasing the stability of a siNA molecule against cleavage by ribonucleases comprising introducing at least one modified nucleotide into the siNA molecule, wherein the modified nucleotide is a 2′-deoxy-2′-fluoro nucleotide. In one embodiment, all pyrimidine nucleotides present in the siNA are 2′-deoxy-2′-fluoro pyrimidine nucleotides. In one embodiment, the modified nucleotides in the siNA include at least one 2′-deoxy-2′-fluoro cytidine or 2′-deoxy-2′-fluoro uridine nucleotide. In another embodiment, the modified nucleotides in the siNA include at least one 2′-fluoro cytidine and at least one 2′-deoxy-2′-fluoro uridine nucleotides. In one embodiment, all uridine nucleotides present in the siNA are 2′-deoxy-2′-fluoro uridine nucleotides. In one embodiment, all cytidine nucleotides present in the siNA are 2′-deoxy-2′-fluoro cytidine nucleotides. In one embodiment, all adenosine nucleotides present in the siNA are 2′-deoxy-2′-fluoro adenosine nucleotides. In one embodiment, all guanosine nucleotides present in the siNA are 2′-deoxy-2′-fluoro guanosine nucleotides. The siNA can further comprise at least one modified internucleotidic linkage, such as phosphorothioate linkage. In one embodiment, the 2′-deoxy-2′-fluoronucleotides are present at specifically selected locations in the siNA that are sensitive to cleavage by ribonucleases, such as locations having pyrimidine nucleotides.

[0065] In one embodiment, the invention features a double-stranded short interfering nucleic acid (siNA) molecule that down-regulates expression of a VEGF and/or VEGFR gene or that directs cleavage of a VEGF and/or VEGFR RNA, comprising a sense region and an antisense region, wherein the antisense region comprises a nucleotide sequence that is complementary to a nucleotide sequence of RNA encoded by the VEGF and/or VEGFR gene or a portion thereof and the sense region comprises a nucleotide sequence that is complementary to the antisense region, and wherein the purine nucleotides present in the antisense region comprise 2′-deoxy-purine nucleotides. In an alternative embodiment, the purine nucleotides present in the antisense region comprise 2′-O-methyl purine nucleotides. In either of the above embodiments, the antisense region can comprise a phosphorothioate internucleotide linkage at the 3′ end of the antisense region. Alternatively, in either of the above embodiments, the antisense region can comprise a glyceryl modification at the 3′ end of the antisense region. In another embodiment of any of the above-described siNA molecules, any nucleotides present in a non-complementary region of the antisense strand (e.g. overhang region) are 2′-deoxy nucleotides.

[0066] In one embodiment, the antisense region of a siNA molecule of the invention comprises sequence complementary to a portion of an endogenous transcript having sequence unique to a particular VEGF and/or VEGFR disease related allele in a subject or organism, such as sequence comprising a single nucleotide polymorphism (SNP) associated with the disease specific allele. As such, the antisense region of a siNA molecule of the invention can comprise sequence complementary to sequences that are unique to a particular allele to provide specificity in mediating selective RNAi against the disease, condition, or trait related allele.

[0067] In one embodiment, the invention features a double-stranded short interfering nucleic acid (siNA) molecule that down-regulates expression of a VEGF and/or VEGFR gene or that directs cleavage of a VEGF and/or VEGFR RNA, wherein the siNA molecule is assembled from two separate oligonucleotide fragments wherein one fragment comprises the sense region and the second fragment comprises the antisense region of the siNA molecule. In another embodiment, the siNA molecule is a double stranded nucleic acid molecule, where each strand is about 21 nucleotides long and where about 19 nucleotides of each fragment of the siNA molecule are base-paired to the complementary nucleotides of the other fragment of the siNA molecule, wherein at least two 3′ terminal nucleotides of each fragment of the siNA molecule are not base-paired to the nucleotides of the other fragment of the siNA molecule. In another embodiment, the siNA molecule is a double stranded nucleic acid molecule, where each strand is about 19 nucleotide long and where the nucleotides of each fragment of the siNA molecule are base-paired to the complementary nucleotides of the other fragment of the siNA molecule to form at least about 15 (e.g., 15, 16, 17, 18, or 19) base pairs, wherein one or both ends of the siNA molecule are blunt ends. In one embodiment, each of the two 3′ terminal nucleotides of each fragment of the siNA molecule is a 2′-deoxy-pyrimidine nucleotide, such as a 2′-deoxy-thymidine. In another embodiment, all nucleotides of each fragment of the siNA molecule are base-paired to the complementary nucleotides of the other fragment of the siNA molecule. In another embodiment, the siNA molecule is a double stranded nucleic acid molecule of about 19 to about 25 base pairs having a sense region and an antisense region, where about 19 nucleotides of the antisense region are base-paired to the nucleotide sequence or a portion thereof of the RNA encoded by the VEGF and/or VEGFR gene. In another embodiment, about 21 nucleotides of the antisense region are base-paired to the nucleotide sequence or a portion thereof of the RNA encoded by the VEGF and/or VEGFR gene. In any of the above embodiments, the 5′-end of the fragment comprising said antisense region can optionally include a phosphate group.

[0068] In one embodiment, the invention features a double-stranded short interfering nucleic acid (siNA) molecule that inhibits the expression of a VEGF and/or VEGFR RNA sequence (e.g., wherein said target RNA sequence is encoded by a VEGF and/or VEGFR gene involved in the VEGF and/or VEGFR pathway), wherein the siNA molecule does not contain any ribonucleotides and wherein each strand of the double-stranded siNA molecule is about 15 to about 30 nucleotides. In one embodiment, the siNA molecule is 21 nucleotides in length. Examples of non-ribonucleotide containing siNA constructs are combinations of stabilization chemistries shown in Table IV in any combination of Sense/Antisense chemistries, such as Stab 7/8, Stab 7/11, Stab 8/8, Stab 18/8, Stab 18/11, Stab 12/13, Stab 7/13, Stab 18/13, Stab 7/19, Stab 8/19, Stab 18/19, Stab 7/20, Stab 8/20, Stab 18/20, Stab 7/32, Stab 8/32, or Stab 18/32 (e.g., any siNA having Stab 7, 8, 11, 12, 13, 14, 15, 17, 18, 19, 20, or 32 sense or antisense strands or any combination thereof).

[0069] In one embodiment, the invention features a chemically synthesized double stranded RNA molecule that directs cleavage of a VEGF and/or VEGFR RNA via RNA interference, wherein each strand of said RNA molecule is about 15 to about 30 nucleotides in length; one strand of the RNA molecule comprises nucleotide sequence having sufficient complementarity to the VEGF and/or VEGFR RNA for the RNA molecule to direct cleavage of the VEGF and/or VEGFR RNA via RNA interference; and wherein at least one strand of the RNA molecule optionally comprises one or more chemically modified nucleotides described herein, such as without limitation deoxynucleotides, 2′-O-methyl nucleotides, 2′-deoxy-2′-fluoro nucleotides, 2′-O-methoxyethyl nucleotides, 2′-O-trifluoromethyl nucleotides, 2′-O-ethyl-trifluoromethoxy nucleotides, 2′-O-difluoromethoxy-ethoxy nucleotides, etc.

[0070] In one embodiment, the invention features a medicament comprising a siNA molecule of the invention.

[0071] In one embodiment, the invention features an active ingredient comprising a siNA molecule of the invention.

[0072] In one embodiment, the invention features the use of a double-stranded short interfering nucleic acid (siNA) molecule to inhibit, down-regulate, or reduce expression of a VEGF and/or VEGFR gene, wherein the siNA molecule comprises one or more chemical modifications and each strand of the double-stranded siNA is independently about 15 to about 30 or more (e.g., about 15, 16, 17, 18, 19, 20, 21, 22, 23, 24, 25, 26, 27, 28, 29 or 30 or more) nucleotides long. In one embodiment, the siNA molecule of the invention is a double stranded nucleic acid molecule comprising one or more chemical modifications, where each of the two fragments of the siNA molecule independently comprise about 15 to about 40 (e.g. about 15, 16, 17, 18, 19, 20, 21, 22, 23, 24, 25, 26, 27, 28, 29, 30, 31, 23, 33, 34, 35, 36, 37, 38, 39, or 40) nucleotides and where one of the strands comprises at least 15 nucleotides that are complementary to nucleotide sequence of VEGF and/or VEGFR encoding RNA or a portion thereof. In a non-limiting example, each of the two fragments of the siNA molecule comprise about 21 nucleotides. In another embodiment, the siNA molecule is a double stranded nucleic acid molecule comprising one or more chemical modifications, where each strand is about 21 nucleotide long and where about 19 nucleotides of each fragment of the siNA molecule are base-paired to the complementary nucleotides of the other fragment of the siNA molecule, wherein at least two 3′ terminal nucleotides of each fragment of the siNA molecule are not base-paired to the nucleotides of the other fragment of the siNA molecule. In another embodiment, the siNA molecule is a double stranded nucleic acid molecule comprising one or more chemical modifications, where each strand is about 19 nucleotide long and where the nucleotides of each fragment of the siNA molecule are base-paired to the complementary nucleotides of the other fragment of the siNA molecule to form at least about 15 (e.g., 15, 16, 17, 18, or 19) base pairs, wherein one or both ends of the siNA molecule are blunt ends. In one embodiment, each of the two 3′ terminal nucleotides of each fragment of the siNA molecule is a 2′-deoxy-pyrimidine nucleotide, such as a 2′-deoxy-thymidine. In another embodiment, all nucleotides of each fragment of the siNA molecule are base-paired to the complementary nucleotides of the other fragment of the siNA molecule. In another embodiment, the siNA molecule is a double stranded nucleic acid molecule of about 19 to about 25 base pairs having a sense region and an antisense region and comprising one or more chemical modifications, where about 19 nucleotides of the antisense region are base-paired to the nucleotide sequence or a portion thereof of the RNA encoded by the VEGF and/or VEGFR gene. In another embodiment, about 21 nucleotides of the antisense region are base-paired to the nucleotide sequence or a portion thereof of the RNA encoded by the VEGF and/or VEGFR gene. In any of the above embodiments, the 5′-end of the fragment comprising said antisense region can optionally include a phosphate group.

[0073] In one embodiment, the invention features the use of a double-stranded short interfering nucleic acid (siNA) molecule that inhibits, down-regulates, or reduces expression of a VEGF and/or VEGFR gene, wherein one of the strands of the double-stranded siNA molecule is an antisense strand which comprises nucleotide sequence that is complementary to nucleotide sequence of VEGF and/or VEGFR RNA or a portion thereof, the other strand is a sense strand which comprises nucleotide sequence that is complementary to a nucleotide sequence of the antisense strand and wherein a majority of the pyrimidine nucleotides present in the double-stranded siNA molecule comprises a sugar modification.

[0074] In one embodiment, the invention features a double-stranded short interfering nucleic acid (siNA) molecule that inhibits, down-regulates, or reduces expression of a VEGF and/or VEGFR gene, wherein one of the strands of the double-stranded siNA molecule is an antisense strand which comprises nucleotide sequence that is complementary to nucleotide sequence of VEGF and/or VEGFR RNA or a portion thereof, wherein the other strand is a sense strand which comprises nucleotide sequence that is complementary to a nucleotide sequence of the antisense strand and wherein a majority of the pyrimidine nucleotides present in the double-stranded siNA molecule comprises a sugar modification.

[0075] In one embodiment, the invention features a double-stranded short interfering nucleic acid (siNA) molecule that inhibits, down-regulates, or reduces expression of a VEGF and/or VEGFR gene, wherein one of the strands of the double-stranded siNA molecule is an antisense strand which comprises nucleotide sequence that is complementary to nucleotide sequence of VEGF and/or VEGFR RNA that encodes a protein or portion thereof, the other strand is a sense strand which comprises nucleotide sequence that is complementary to a nucleotide sequence of the antisense strand and wherein a majority of the pyrimidine nucleotides present in the double-stranded siNA molecule comprises a sugar modification. In one embodiment, each strand of the siNA molecule comprises about 15 to about 30 or more (e.g., about 15, 16, 17, 18, 19, 20, 21, 22, 23, 24, 25, 26, 27, 28, 29, or 30 or more) nucleotides, wherein each strand comprises at least about 15 nucleotides that are complementary to the nucleotides of the other strand. In one embodiment, the siNA molecule is assembled from two oligonucleotide fragments, wherein one fragment comprises the nucleotide sequence of the antisense strand of the siNA molecule and a second fragment comprises nucleotide sequence of the sense region of the siNA molecule. In one embodiment, the sense strand is connected to the antisense strand via a linker molecule, such as a polynucleotide linker or a non-nucleotide linker. In a further embodiment, the pyrimidine nucleotides present in the sense strand are 2′-deoxy-2′fluoro pyrimidine nucleotides and the purine nucleotides present in the sense region are 2′-deoxy purine nucleotides. In another embodiment, the pyrimidine nucleotides present in the sense strand are 2′-deoxy-2′fluoro pyrimidine nucleotides and the purine nucleotides present in the sense region are 2′-O-methyl purine nucleotides. In still another embodiment, the pyrimidine nucleotides present in the antisense strand are 2′-deoxy-2′-fluoro pyrimidine nucleotides and any purine nucleotides present in the antisense strand are 2′-deoxy purine nucleotides. In another embodiment, the antisense strand comprises one or more 2′-deoxy-2′-fluoro pyrimidine nucleotides and one or more 2′-O-methyl purine nucleotides. In another embodiment, the pyrimidine nucleotides present in the antisense strand are 2′-deoxy-2′-fluoro pyrimidine nucleotides and any purine nucleotides present in the antisense strand are 2′-O-methyl purine nucleotides. In a further embodiment the sense strand comprises a 3′-end and a 5′-end, wherein a terminal cap moiety (e.g., an inverted deoxy abasic moiety or inverted deoxy nucleotide moiety such as inverted thymidine) is present at the 5′-end, the 3′-end, or both of the 5′ and 3′ ends of the sense strand. In another embodiment, the antisense strand comprises a phosphorothioate internucleotide linkage at the 3′ end of the antisense strand. In another embodiment, the antisense strand comprises a glyceryl modification at the 3′ end. In another embodiment, the 5′-end of the antisense strand optionally includes a phosphate group.

[0076] In any of the above-described embodiments of a double-stranded short interfering nucleic acid (siNA) molecule that inhibits expression of a VEGF and/or VEGFR gene, wherein a majority of the pyrimidine nucleotides present in the double-stranded siNA molecule comprises a sugar modification, each of the two strands of the siNA molecule can comprise about 15 to about 30 or more (e.g., about 15, 16, 17, 18, 19, 20, 21, 22, 23, 24, 25, 26, 27, 28, 29, or 30 or more) nucleotides. In one embodiment, about 15 to about 30 or more (e.g., about 15, 16, 17, 18, 19, 20, 21, 22, 23, 24, 25, 26, 27, 28, 29, or 30 or more) nucleotides of each strand of the siNA molecule are base-paired to the complementary nucleotides of the other strand of the siNA molecule. In another embodiment, about 15 to about 30 or more (e.g., about 15, 16, 17, 18, 19, 20, 21, 22, 23, 24, 25, 26, 27, 28, 29, or 30 or more) nucleotides of each strand of the siNA molecule are base-paired to the complementary nucleotides of the other strand of the siNA molecule, wherein at least two 3′ terminal nucleotides of each strand of the siNA molecule are not base-paired to the nucleotides of the other strand of the siNA molecule. In another embodiment, each of the two 3′ terminal nucleotides of each fragment of the siNA molecule is a 2′-deoxy-pyrimidine, such as 2′-deoxy-thymidine. In one embodiment, each strand of the siNA molecule is base-paired to the complementary nucleotides of the other strand of the siNA molecule. In one embodiment, about 15 to about 30 (e.g., about 15, 16, 17, 18, 19, 20, 21, 22, 23, 24, 25, 26, 27, 28, 29, or 30) nucleotides of the antisense strand are base-paired to the nucleotide sequence of the VEGF and/or VEGFR RNA or a portion thereof. In one embodiment, about 18 to about 25 (e.g., about 18, 19, 20, 21, 22, 23, 24, or 25) nucleotides of the antisense strand are base-paired to the nucleotide sequence of the VEGF and/or VEGFR RNA or a portion thereof.

[0077] In one embodiment, the invention features a double-stranded short interfering nucleic acid (siNA) molecule that inhibits expression of a VEGF and/or VEGFR gene, wherein one of the strands of the double-stranded siNA molecule is an antisense strand which comprises nucleotide sequence that is complementary to nucleotide sequence of VEGF and/or VEGFR RNA or a portion thereof, the other strand is a sense strand which comprises nucleotide sequence that is complementary to a nucleotide sequence of the antisense strand and wherein a majority of the pyrimidine nucleotides present in the double-stranded siNA molecule comprises a sugar modification, and wherein the 5′-end of the antisense strand optionally includes a phosphate group.

[0078] In one embodiment, the invention features a double-stranded short interfering nucleic acid (siNA) molecule that inhibits expression of a VEGF and/or VEGFR gene, wherein one of the strands of the double-stranded siNA molecule is an antisense strand which comprises nucleotide sequence that is complementary to nucleotide sequence of VEGF and/or VEGFR RNA or a portion thereof, the other strand is a sense strand which comprises nucleotide sequence that is complementary to a nucleotide sequence of the antisense strand and wherein a majority of the pyrimidine nucleotides present in the double-stranded siNA molecule comprises a sugar modification, and wherein the nucleotide sequence or a portion thereof of the antisense strand is complementary to a nucleotide sequence of the untranslated region or a portion thereof of the VEGF and/or VEGFR RNA.

[0079] In one embodiment, the invention features a double-stranded short interfering nucleic acid (siNA) molecule that inhibits expression of a VEGF and/or VEGFR gene, wherein one of the strands of the double-stranded siNA molecule is an antisense strand which comprises nucleotide sequence that is complementary to nucleotide sequence of VEGF and/or VEGFR RNA or a portion thereof, wherein the other strand is a sense strand which comprises nucleotide sequence that is complementary to a nucleotide sequence of the antisense strand, wherein a majority of the pyrimidine nucleotides present in the double-stranded siNA molecule comprises a sugar modification, and wherein the nucleotide sequence of the antisense strand is complementary to a nucleotide sequence of the VEGF and/or VEGFR RNA or a portion thereof that is present in the VEGF and/or VEGFR RNA.

[0080] In one embodiment, the invention features a composition comprising a siNA molecule of the invention in a pharmaceutically acceptable carrier or diluent.

[0081] In a non-limiting example, the introduction of chemically-modified nucleotides into nucleic acid molecules provides a powerful tool in overcoming potential limitations of in vivo stability and bioavailability inherent to native RNA molecules that are delivered exogenously. For example, the use of chemically-modified nucleic acid molecules can enable a lower dose of a particular nucleic acid molecule for a given therapeutic effect since chemically-modified nucleic acid molecules tend to have a longer half-life in serum. Furthermore, certain chemical modifications can improve the bioavailability of nucleic acid molecules by targeting particular cells or tissues and/or improving cellular uptake of the nucleic acid molecule. Therefore, even if the activity of a chemically-modified nucleic acid molecule is reduced as compared to a native nucleic acid molecule, for example, when compared to an all-RNA nucleic acid molecule, the overall activity of the modified nucleic acid molecule can be greater than that of the native molecule due to improved stability and/or delivery of the molecule. Unlike native unmodified siNA, chemically-modified siNA can also minimize the possibility of activating interferon activity in humans.

[0082] In any of the embodiments of siNA molecules described herein, the antisense region of a siNA molecule of the invention can comprise a phosphorothioate internucleotide linkage at the 3′-end of said antisense region. In any of the embodiments of siNA molecules described herein, the antisense region can comprise about one to about five phosphorothioate internucleotide linkages at the 5′-end of said antisense region. In any of the embodiments of siNA molecules described herein, the 3′-terminal nucleotide overhangs of a siNA molecule of the invention can comprise ribonucleotides or deoxyribonucleotides that are chemically-modified at a nucleic acid sugar, base, or backbone. In any of the embodiments of siNA molecules described herein, the 3′-terminal nucleotide overhangs can comprise one or more universal base ribonucleotides. In any of the embodiments of siNA molecules described herein, the 3′-terminal nucleotide overhangs can comprise one or more acyclic nucleotides.

[0083] One embodiment of the invention provides an expression vector comprising a nucleic acid sequence encoding at least one siNA molecule of the invention in a manner that allows expression of the nucleic acid molecule. Another embodiment of the invention provides a mammalian cell comprising such an expression vector. The mammalian cell can be a human cell. The siNA molecule of the expression vector can comprise a sense region and an antisense region. The antisense region can comprise sequence complementary to a RNA or DNA sequence encoding VEGF and/or VEGFR and the sense region can comprise sequence complementary to the antisense region. The siNA molecule can comprise two distinct strands having complementary sense and antisense regions. The siNA molecule can comprise a single strand having complementary sense and antisense regions.

[0084] In one embodiment, the invention features a chemically-modified short interfering nucleic acid (siNA) molecule capable of mediating RNA interference (RNAi) against VEGF and/or VEGFR inside a cell or reconstituted in vitro system, wherein the chemical modification comprises one or more (e.g., about 1, 2, 3, 4, 5, 6, 7, 8, 9, 10, or more) nucleotides comprising a backbone modified internucleotide linkage having Formula I: [chemical structure]
[0085] wherein each R1 and R2 is independently any nucleotide, non-nucleotide, or polynucleotide which can be naturally-occurring or chemically-modified, each X and Y is independently O, S, N, alkyl, or substituted alkyl, each Z and W is independently O, S, N, alkyl, substituted alkyl, O-alkyl, S-alkyl, alkaryl, aralkyl, or acetyl and wherein W, X, Y, and Z are optionally not all O. In another embodiment, a backbone modification of the invention comprises a phosphonoacetate and/or thiophosphonoacetate internucleotide linkage (see for example Sheehan et al., 2003, Nucleic Acids Research, 31, 4109-4118).

[0086] The chemically-modified internucleotide linkages having Formula I, for example, wherein any Z, W, X, and/or Y independently comprises a sulphur atom, can be present in one or both oligonucleotide strands of the siNA duplex, for example, in the sense strand, the antisense strand, or both strands. The siNA molecules of the invention can comprise one or more (e.g., about 1, 2, 3, 4, 5, 6, 7, 8, 9, 10, or more) chemically-modified internucleotide linkages having Formula I at the 3′-end, the 5′-end, or both of the 3′ and 5′-ends of the sense strand, the antisense strand, or both strands. For example, an exemplary siNA molecule of the invention can comprise about 1 to about 5 or more (e.g., about 1, 2, 3, 4, 5, or more) chemically-modified internucleotide linkages having Formula I at the 5′-end of the sense strand, the antisense strand, or both strands. In another non-limiting example, an exemplary siNA molecule of the invention can comprise one or more (e.g., about 1, 2, 3, 4, 5, 6, 7, 8, 9, 10, or more) pyrimidine nucleotides with chemically-modified internucleotide linkages having Formula I in the sense strand, the antisense strand, or both strands. In yet another non-limiting example, an exemplary siNA molecule of the invention can comprise one or more (e.g., about 1, 2, 3, 4, 5, 6, 7, 8, 9, 10, or more) purine nucleotides with chemically-modified internucleotide linkages having Formula I in the sense strand, the antisense strand, or both strands. In another embodiment, a siNA molecule of the invention having internucleotide linkage(s) of Formula I also comprises a chemically-modified nucleotide or non-nucleotide having any of Formulae I-VII.

[0087] In one embodiment, the invention features a chemically-modified short interfering nucleic acid (siNA) molecule capable of mediating RNA interference (RNAi) against VEGF and/or VEGFR inside a cell or reconstituted in vitro system, wherein the chemical modification comprises one or more (e.g., about 1, 2, 3, 4, 5, 6, 7, 8, 9, 10, or more) nucleotides or non-nucleotides having Formula II: [chemical structure]
wherein each R3, R4, R5, R6, R7, R8, R10, R11 and R12 is independently H, OH, alkyl, substituted alkyl, alkaryl or aralkyl, F, Cl, Br, CN, CF3, OCF3, OCN, O-alkyl, S-alkyl, N-alkyl, O-alkenyl, S-alkenyl, N-alkenyl, SO-alkyl, alkyl-OSH, alkyl-OH, O-alkyl-OH, O-alkyl-SH, S-alkyl-OH, S-alkyl-SH, alkyl-S-alkyl, alkyl-O-alkyl, ONO2, NO2, N3, NH2, aminoalkyl, aminoacid, aminoacyl, ONH2, O-aminoalkyl, O-aminoacid, O-aminoacyl, heterocycloalkyl, heterocycloalkaryl, aminoalkylamino, polyalklylamino, substituted silyl, or group having Formula I or II; R9 is O, S, CH2, S═O, CHF, or CF2, and B is a nucleosidic base such as adenine, guanine, uracil, cytosine, thymine, 2-aminoadenosine, 5-methylcytosine, 2,6-diaminopurine, or any other non-naturally occurring base that can be complementary or non-complementary to target RNA or a non-nucleosidic base such as phenyl, naphthyl, 3-nitropyrrole, 5-nitroindole, nebularine, pyridone, pyridinone, or any other non-naturally occurring universal base that can be complementary or non-complementary to target RNA.

[0088] The chemically-modified nucleotide or non-nucleotide of Formula II can be present in one or both oligonucleotide strands of the siNA duplex, for example in the sense strand, the antisense strand, or both strands. The siNA molecules of the invention can comprise one or more chemically-modified nucleotides or non-nucleotides of Formula II at the 3′-end, the 5′-end, or both of the 3′ and 5′-ends of the sense strand, the antisense strand, or both strands. For example, an exemplary siNA molecule of the invention can comprise about 1 to about 5 or more (e.g., about 1, 2, 3, 4, 5, or more) chemically-modified nucleotides or non-nucleotides of Formula II at the 5′-end of the sense strand, the antisense strand, or both strands. In anther non-limiting example, an exemplary siNA molecule of the invention can comprise about 1 to about 5 or more (e.g., about 1, 2, 3, 4, 5, or more) chemically-modified nucleotides or non-nucleotides of Formula II at the 3′-end of the sense strand, the antisense strand, or both strands.

[0089] In one embodiment, the invention features a chemically-modified short interfering nucleic acid (siNA) molecule capable of mediating RNA interference (RNAi) against VEGF and/or VEGFR inside a cell or reconstituted in vitro system, wherein the chemical modification comprises one or more (e.g., about 1, 2, 3, 4, 5, 6, 7, 8, 9, 10, or more) nucleotides or non-nucleotides having Formula III: [chemical structure]
wherein each R3, R4, R5, R6, R7, R8, R10, R11 and R12 is independently H, OH, alkyl, substituted alkyl, alkaryl or aralkyl, F, Cl, Br, CN, CF3, OCF3, OCN, O-alkyl, S-alkyl, N-alkyl, O-alkenyl, S-alkenyl, N-alkenyl, SO-alkyl, alkyl-OSH, alkyl-OH, O-alkyl-OH, O-alkyl-SH, S-alkyl-OH, S-alkyl-SH, alkyl-S-alkyl, alkyl-O-alkyl, ONO₂, NO2, N3, NH2, aminoalkyl, aminoacid, aminoacyl, ONH2, O-aminoalkyl, O-aminoacid, O-aminoacyl, heterocycloalkyl, heterocycloalkaryl, aminoalkylamino, polyalklylamino, substituted silyl, or group having Formula I or II; R9 is O, S, CH2, S═O, CHF, or CF2, and B is a nucleosidic base such as adenine, guanine, uracil, cytosine, thymine, 2-aminoadenosine, 5-methylcytosine, 2,6-diaminopurine, or any other non-naturally occurring base that can be employed to be complementary or non-complementary to target RNA or a non-nucleosidic base such as phenyl, naphthyl, 3-nitropyrrole, 5-nitroindole, nebularine, pyridone, pyridinone, or any other non-naturally occurring universal base that can be complementary or non-complementary to target RNA.

[0090] The chemically-modified nucleotide or non-nucleotide of Formula III can be present in one or both oligonucleotide strands of the siNA duplex, for example, in the sense strand, the antisense strand, or both strands. The siNA molecules of the invention can comprise one or more chemically-modified nucleotides or non-nucleotides of Formula III at the 3′-end, the 5′-end, or both of the 3′ and 5′-ends of the sense strand, the antisense strand, or both strands. For example, an exemplary siNA molecule of the invention can comprise about 1 to about 5 or more (e.g., about 1, 2, 3, 4, 5, or more) chemically-modified nucleotide(s) or non-nucleotide(s) of Formula III at the 5′-end of the sense strand, the antisense strand, or both strands. In anther non-limiting example, an exemplary siNA molecule of the invention can comprise about 1 to about 5 or more (e.g., about 1, 2, 3, 4, 5, or more) chemically-modified nucleotide or non-nucleotide of Formula III at the 3′-end of the sense strand, the antisense strand, or both strands.

[0091] In another embodiment, a siNA molecule of the invention comprises a nucleotide having Formula II or III, wherein the nucleotide having Formula II or III is in an inverted configuration. For example, the nucleotide having Formula II or III is connected to the siNA construct in a 3′-3′,3′-2′,2′-3′, or 5′-5′ configuration, such as at the 3′-end, the 5′-end, or both of the 3′ and 5′-ends of one or both siNA strands.

[0092] In one embodiment, the invention features a chemically-modified short interfering nucleic acid (siNA) molecule capable of mediating RNA interference (RNAi) against VEGF and/or VEGFR inside a cell or reconstituted in vitro system, wherein the chemical modification comprises a 5′-terminal phosphate group having Formula IV: [chemical structure]
wherein each X and Y is independently O, S, N, alkyl, substituted alkyl, or alkylhalo; wherein each Z and W is independently O, S, N, alkyl, substituted alkyl, O-alkyl, S-alkyl, alkaryl, aralkyl, alkylhalo, or acetyl; and wherein W, X, Y and Z are not all O.

[0093] In one embodiment, the invention features a siNA molecule having a 5′-terminal phosphate group having Formula IV on the target-complementary strand, for example, a strand complementary to a target RNA, wherein the siNA molecule comprises an all RNA siNA molecule. In another embodiment, the invention features a siNA molecule having a 5′-terminal phosphate group having Formula IV on the target-complementary strand wherein the siNA molecule also comprises about 1 to about 3 (e.g., about 1, 2, or 3) nucleotide 3′-terminal nucleotide overhangs having about 1 to about 4 (e.g., about 1, 2, 3, or 4) deoxyribonucleotides on the 3′-end of one or both strands. In another embodiment, a 5′-terminal phosphate group having Formula IV is present on the target-complementary strand of a siNA molecule of the invention, for example a siNA molecule having chemical modifications having any of Formulae I-VII.

[0094] In one embodiment, the invention features a chemically-modified short interfering nucleic acid (siNA) molecule capable of mediating RNA interference (RNAi) against VEGF and/or VEGFR inside a cell or reconstituted in vitro system, wherein the chemical modification comprises one or more phosphorothioate internucleotide linkages. For example, in a non-limiting example, the invention features a chemically-modified short interfering nucleic acid (siNA) having about 1, 2, 3, 4, 5, 6, 7, 8 or more phosphorothioate internucleotide linkages in one siNA strand. In yet another embodiment, the invention features a chemically-modified short interfering nucleic acid (siNA) individually having about 1, 2, 3, 4, 5, 6, 7, 8 or more phosphorothioate internucleotide linkages in both siNA strands. The phosphorothioate internucleotide linkages can be present in one or both oligonucleotide strands of the siNA duplex, for example in the sense strand, the antisense strand, or both strands. The siNA molecules of the invention can comprise one or more phosphorothioate internucleotide linkages at the 3′-end, the 5′-end, or both of the 3′- and 5′-ends of the sense strand, the antisense strand, or both strands. For example, an exemplary siNA molecule of the invention can comprise about 1 to about 5 or more (e.g., about 1, 2, 3, 4, 5, or more) consecutive phosphorothioate internucleotide linkages at the 5′-end of the sense strand, the antisense strand, or both strands. In another non-limiting example, an exemplary siNA molecule of the invention can comprise one or more (e.g., about 1, 2, 3, 4, 5, 6, 7, 8, 9, 10, or more) pyrimidine phosphorothioate internucleotide linkages in the sense strand, the antisense strand, or both strands. In yet another non-limiting example, an exemplary siNA molecule of the invention can comprise one or more (e.g., about 1, 2, 3, 4, 5, 6, 7, 8, 9, 10, or more) purine phosphorothioate internucleotide linkages in the sense strand, the antisense strand, or both strands.

[0095] In one embodiment, the invention features a siNA molecule, wherein the sense strand comprises one or more, for example, about 1, 2, 3, 4, 5, 6, 7, 8, 9, 10, or more phosphorothioate internucleotide linkages, and/or one or more (e.g., about 1, 2, 3, 4, 5, 6, 7, 8, 9, 10 or more) 2′-deoxy, 2′-O-methyl, 2′-deoxy-2′-fluoro, 2′-O-trifluoromethyl, 2′-O-ethyl-trifluoromethoxy, 2′-O-difluoromethoxy-ethoxy and/or about one or more (e.g., about 1, 2, 3, 4, 5, 6, 7, 8, 9, 10 or more) universal base modified nucleotides, and optionally a terminal cap molecule at the 3′-end, the 5′-end, or both of the 3′- and 5′-ends of the sense strand; and wherein the antisense strand comprises about 1 to about 10 or more, specifically about 1, 2, 3, 4, 5, 6, 7, 8, 9, 10, or more phosphorothioate internucleotide linkages, and/or one or more (e.g., about 1, 2, 3, 4, 5, 6, 7, 8, 9, 10 or more) 2′-deoxy, 2′-O-methyl, 2′-deoxy-2′-fluoro, 2′-O-trifluoromethyl, 2′-O-ethyl-trifluoromethoxy, 2′-O-difluoromethoxy-ethoxy, 4′-thio and/or one or more (e.g., about 1, 2, 3, 4, 5, 6, 7, 8, 9, 10 or more) universal base modified nucleotides, and optionally a terminal cap molecule at the 3′-end, the 5′-end, or both of the 3′- and 5′-ends of the antisense strand. In another embodiment, one or more, for example about 1, 2, 3, 4, 5, 6, 7, 8, 9, 10, or more, pyrimidine nucleotides of the sense and/or antisense siNA strand are chemically-modified with 2′-deoxy, 2′-O-methyl, 4-thio, 2′-O-trifluoromethyl, 2′-O-ethyl-trifluoromethoxy, 2′-O-difluoromethoxy-ethoxy, 4′-thio and/or 2′-deoxy-2′-fluoro nucleotides, with or without one or more, for example about 1, 2, 3, 4, 5, 6, 7, 8, 9, 10, or more, phosphorothioate internucleotide linkages and/or a terminal cap molecule at the 3′-end, the 5′-end, or both of the 3′- and 5′-ends, being present in the same or different strand.

[0096] In another embodiment, the invention features a siNA molecule, wherein the sense strand comprises about 1 to about 5, specifically about 1, 2, 3, 4, or 5 phosphorothioate internucleotide linkages, and/or one or more (e.g., about 1, 2, 3, 4, 5, or more) 2′-deoxy, 2′-O-methyl, 2′-deoxy-2′-fluoro, 2′-O-trifluoromethyl, 2′-O-ethyl-trifluoromethoxy, 2′-O-difluoromethoxy-ethoxy, 4′-thio and/or one or more (e.g., about 1, 2, 3, 4, 5, or more) universal base modified nucleotides, and optionally a terminal cap molecule at the 3-end, the 5′-end, or both of the 3′- and 5′-ends of the sense strand; and wherein the antisense strand comprises about 1 to about 5 or more, specifically about 1, 2, 3, 4, 5, or more phosphorothioate internucleotide linkages, and/or one or more (e.g., about 1, 2, 3, 4, 5, 6, 7, 8, 9, 10 or more) 2′-deoxy, 2′-O-methyl, 2′-deoxy-2′-fluoro, 2′-O-trifluoromethyl, 2′-O-ethyl-trifluoromethoxy, 2′-O-difluoromethoxy-ethoxy, 4′-thio and/or one or more (e.g., about 1, 2, 3, 4, 5, 6, 7, 8, 9, 10 or more) universal base modified nucleotides, and optionally a terminal cap molecule at the 3′-end, the 5′-end, or both of the 3′- and 5′-ends of the antisense strand. In another embodiment, one or more, for example about 1, 2, 3, 4, 5, 6, 7, 8, 9, 10, or more, pyrimidine nucleotides of the sense and/or antisense siNA strand are chemically-modified with 2′-deoxy, 2′-O-methyl, 4-thio, 2′-O-trifluoromethyl, 2′-O-ethyl-trifluoromethoxy, 2′-O-difluoromethoxy-ethoxy, 4′-thio and/or 2′-deoxy-2′-fluoro nucleotides, with or without about 1 to about 5 or more, for example about 1, 2, 3, 4, 5, or more phosphorothioate internucleotide linkages and/or a terminal cap molecule at the 3′-end, the 5′-end, or both of the 3′- and 5′-ends, being present in the same or different strand.

[0097] In one embodiment, the invention features a siNA molecule, wherein the antisense strand comprises one or more, for example, about 1, 2, 3, 4, 5, 6, 7, 8, 9, 10, or more phosphorothioate internucleotide linkages, and/or about one or more (e.g., about 1, 2, 3, 4, 5, 6, 7, 8, 9, 10 or more) 2′-deoxy, 2′-O-methyl, 2′-deoxy-2′-fluoro, 2′-O-trifluoromethyl, 2′-O-ethyl-trifluoromethoxy, 2′-O-difluoromethoxy-ethoxy, 4′-thio and/or one or more (e.g., about 1, 2, 3, 4, 5, 6, 7, 8, 9, 10 or more) universal base modified nucleotides, and optionally a terminal cap molecule at the 3′-end, the 5′-end, or both of the 3′- and 5′-ends of the sense strand; and wherein the antisense strand comprises about 1 to about 10 or more, specifically about 1, 2, 3, 4, 5, 6, 7, 8, 9, 10 or more phosphorothioate internucleotide linkages, and/or one or more (e.g., about 1, 2, 3, 4, 5, 6, 7, 8, 9, 10 or more) 2′-deoxy, 2′-O-methyl, 2′-deoxy-2′-fluoro, 2′-O-trifluoromethyl, 2′-O-ethyl-trifluoromethoxy, 2′-O-difluoromethoxy-ethoxy, 4′-thio and/or one or more (e.g., about 1, 2, 3, 4, 5, 6, 7, 8, 9, 10 or more) universal base modified nucleotides, and optionally a terminal cap molecule at the 3′-end, the 5′-end, or both of the 3′- and 5′-ends of the antisense strand. In another embodiment, one or more, for example about 1, 2, 3, 4, 5, 6, 7, 8, 9, 10 or more pyrimidine nucleotides of the sense and/or antisense siNA strand are chemically-modified with 2′-deoxy, 2′-O-methyl, 4-thio, 2′-O-trifluoromethyl, 2′-O-ethyl-trifluoromethoxy, 2′-O-difluoromethoxy-ethoxy, 4′-thio and/or 2′-deoxy-2′-fluoro nucleotides, with or without one or more, for example, about 1, 2, 3, 4, 5, 6, 7, 8, 9, 10 or more phosphorothioate internucleotide linkages and/or a terminal cap molecule at the 3′-end, the 5′-end, or both of the 3′ and 5′-ends, being present in the same or different strand.

[0098] In another embodiment, the invention features a siNA molecule, wherein the antisense strand comprises about 1 to about 5 or more, specifically about 1, 2, 3, 4, 5 or more phosphorothioate internucleotide linkages, and/or one or more (e.g., about 1, 2, 3, 4, 5, 6, 7, 8, 9, 10 or more) 2′-deoxy, 2′-O-methyl, 2′-deoxy-2′-fluoro, 2′-O-trifluoromethyl, 2′-O-ethyl-trifluoromethoxy, 2′-O-difluoromethoxy-ethoxy, 4′-thio and/or one or more (e.g., about 1, 2, 3, 4, 5, 6, 7, 8, 9, 10 or more) universal base modified nucleotides, and optionally a terminal cap molecule at the 3′-end, the 5′-end, or both of the 3′- and 5′-ends of the sense strand; and wherein the antisense strand comprises about 1 to about 5 or more, specifically about 1, 2, 3, 4, 5 or more phosphorothioate internucleotide linkages, and/or one or more (e.g., about 1, 2, 3, 4, 5, 6, 7, 8, 9, 10 or more) 2′-deoxy, 2′-O-methyl, 2′-deoxy-2′-fluoro, 2′-O-trifluoromethyl, 2′-O-ethyl-trifluoromethoxy, 2′-O-difluoromethoxy-ethoxy, 4′-thio and/or one or more (e.g., about 1, 2, 3, 4, 5, 6, 7, 8, 9, 10 or more) universal base modified nucleotides, and optionally a terminal cap molecule at the 3′-end, the 5′-end, or both of the 3′- and 5′-ends of the antisense strand. In another embodiment, one or more, for example about 1, 2, 3, 4, 5, 6, 7, 8, 9, 10 or more pyrimidine nucleotides of the sense and/or antisense siNA strand are chemically-modified with 2′-deoxy, 2′-O-methyl, 4-thio, 2′-O-trifluoromethyl, 2′-O-ethyl-trifluoromethoxy, 2′-O-difluoromethoxy-ethoxy, 4′-thio and/or 2′-deoxy-2′-fluoro nucleotides, with or without about 1 to about 5, for example about 1, 2, 3, 4, 5 or more phosphorothioate internucleotide linkages and/or a terminal cap molecule at the 3′-end, the 5′-end, or both of the 3′- and 5′-ends, being present in the same or different strand.

[0099] In one embodiment, the invention features a chemically-modified short interfering nucleic acid (siNA) molecule having about 1 to about 5 or more (specifically about 1, 2, 3, 4, 5 or more) phosphorothioate internucleotide linkages in each strand of the siNA molecule.

[0100] In another embodiment, the invention features a siNA molecule comprising 2′-5′ internucleotide linkages. The 2′-5′ internucleotide linkage(s) can be at the 3′-end, the 5′-end, or both of the 3′- and 5′-ends of one or both siNA sequence strands. In addition, the 2′-5′ internucleotide linkage(s) can be present at various other positions within one or both siNA sequence strands, for example, about 1, 2, 3, 4, 5, 6, 7, 8, 9, 10, or more including every internucleotide linkage of a pyrimidine nucleotide in one or both strands of the siNA molecule can comprise a 2′-5′ internucleotide linkage, or about 1, 2, 3, 4, 5, 6, 7, 8, 9, 10, or more including every internucleotide linkage of a purine nucleotide in one or both strands of the siNA molecule can comprise a 2′-5′ internucleotide linkage.

[0101] In another embodiment, a chemically-modified siNA molecule of the invention comprises a duplex having two strands, one or both of which can be chemically-modified, wherein each strand is independently about 15 to about 30 (e.g., about 15, 16, 17, 18, 19, 20, 21, 22, 23, 24, 25, 26, 27, 28, 29, or 30) nucleotides in length, wherein the duplex has about 15 to about 30 (e.g., about 15, 16, 17, 18, 19, 20, 21, 22, 23, 24, 25, 26, 27, 28, 29, or 30) base pairs, and wherein the chemical modification comprises a structure having any of Formulae I-VII. For example, an exemplary chemically-modified siNA molecule of the invention comprises a duplex having two strands, one or both of which can be chemically-modified with a chemical modification having any of Formulae I-VII or any combination thereof, wherein each strand consists of about 21 nucleotides, each having a 2-nucleotide 3′-terminal nucleotide overhang, and wherein the duplex has about 19 base pairs. In another embodiment, a siNA molecule of the invention comprises a single stranded hairpin structure, wherein the siNA is about 36 to about 70 (e.g., about 36, 40, 45, 50, 55, 60, 65, or 70) nucleotides in length having about 15 to about 30 (e.g., about 15, 16, 17, 18, 19, 20, 21, 22, 23, 24, 25, 26, 27, 28, 29, or 30) base pairs, and wherein the siNA can include a chemical modification comprising a structure having any of Formulae I-VII or any combination thereof. For example, an exemplary chemically-modified siNA molecule of the invention comprises a linear oligonucleotide having about 42 to about 50 (e.g., about 42, 43, 44, 45, 46, 47, 48, 49, or 50) nucleotides that is chemically-modified with a chemical modification having any of Formulae I-VII or any combination thereof, wherein the linear oligonucleotide forms a hairpin structure having about 19 to about 21 (e.g., 19, 20, or 21) base pairs and a 2-nucleotide 3′-terminal nucleotide overhang. In another embodiment, a linear hairpin siNA molecule of the invention contains a stem loop motif, wherein the loop portion of the siNA molecule is biodegradable. For example, a linear hairpin siNA molecule of the invention is designed such that degradation of the loop portion of the siNA molecule in vivo can generate a double-stranded siNA molecule with 3′-terminal overhangs, such as 3′-terminal nucleotide overhangs comprising about 2 nucleotides.

[0102] In another embodiment, a siNA molecule of the invention comprises a hairpin structure, wherein the siNA is about 25 to about 50 (e.g., about 25, 26, 27, 28, 29, 30, 31, 32, 33, 34, 35, 36, 37, 38, 39, 40, 41, 42, 43, 44, 45, 46, 47, 48, 49, or 50) nucleotides in length having about 3 to about 25 (e.g., about 3, 4, 5, 6, 7, 8, 9, 10, 11, 12, 13, 14, 15, 16, 17, 18, 19, 20, 21, 22, 23, 24, or 25) base pairs, and wherein the siNA can include one or more chemical modifications comprising a structure having any of Formulae I-VII or any combination thereof. For example, an exemplary chemically-modified siNA molecule of the invention comprises a linear oligonucleotide having about 25 to about 35 (e.g., about 25, 26, 27, 28, 29, 30, 31, 32, 33, 34, or 35) nucleotides that is chemically-modified with one or more chemical modifications having any of Formulae I-VII or any combination thereof, wherein the linear oligonucleotide forms a hairpin structure having about 3 to about 25 (e.g., about 3, 4, 5, 6, 7, 8, 9, 10, 11, 12, 13, 14, 15, 16, 17, 18, 19, 20, 21, 22, 23, 24, or 25) base pairs and a 5′-terminal phosphate group that can be chemically modified as described herein (for example a 5′-terminal phosphate group having Formula IV). In another embodiment, a linear hairpin siNA molecule of the invention contains a stem loop motif, wherein the loop portion of the siNA molecule is biodegradable. In one embodiment, a linear hairpin siNA molecule of the invention comprises a loop portion comprising a non-nucleotide linker.

[0103] In another embodiment, a siNA molecule of the invention comprises an asymmetric hairpin structure, wherein the siNA is about 25 to about 50 (e.g., about 25, 26, 27, 28, 29, 30, 31, 32, 33, 34, 35, 36, 37, 38, 39, 40, 41, 42, 43, 44, 45, 46, 47, 48, 49, or 50) nucleotides in length having about 3 to about 25 (e.g., about 3, 4, 5, 6, 7, 8, 9, 10, 11, 12, 13, 14, 15, 16, 17, 18, 19, 20, 21, 22, 23, 24, or 25) base pairs, and wherein the siNA can include one or more chemical modifications comprising a structure having any of Formulae I-VII or any combination thereof. For example, an exemplary chemically-modified siNA molecule of the invention comprises a linear oligonucleotide having about 25 to about 35 (e.g., about 25, 26, 27, 28, 29, 30, 31, 32, 33, 34, or 35) nucleotides that is chemically-modified with one or more chemical modifications having any of Formulae I-VII or any combination thereof, wherein the linear oligonucleotide forms an asymmetric hairpin structure having about 3 to about 25 (e.g., about 3, 4, 5, 6, 7, 8, 9, 10, 11, 12, 13, 14, 15, 16, 17, 18, 19, 20, 21, 22, 23, 24, or 25) base pairs and a 5′-terminal phosphate group that can be chemically modified as described herein (for example a 5′-terminal phosphate group having Formula IV). In one embodiment, an asymmetric hairpin siNA molecule of the invention contains a stem loop motif, wherein the loop portion of the siNA molecule is biodegradable. In another embodiment, an asymmetric hairpin siNA molecule of the invention comprises a loop portion comprising a non-nucleotide linker.

[0104] In another embodiment, a siNA molecule of the invention comprises an asymmetric double stranded structure having separate polynucleotide strands comprising sense and antisense regions, wherein the antisense region is about 15 to about 30 (e.g., about 15, 16, 17, 18, 19, 20, 21, 22, 23, 24, 25, 26, 27, 28, 29, or 30) nucleotides in length, wherein the sense region is about 3 to about 25 (e.g., about 3, 4, 5, 6, 7, 8, 9, 10, 11, 12, 13, 14, 15, 16, 17, 18, 19, 20, 21, 22, 23, 24, or 25) nucleotides in length, wherein the sense region and the antisense region have at least 3 complementary nucleotides, and wherein the siNA can include one or more chemical modifications comprising a structure having any of Formulae I-VII or any combination thereof. For example, an exemplary chemically-modified siNA molecule of the invention comprises an asymmetric double stranded structure having separate polynucleotide strands comprising sense and antisense regions, wherein the antisense region is about 18 to about 23 (e.g., about 18, 19, 20, 21, 22, or 23) nucleotides in length and wherein the sense region is about 3 to about 15 (e.g., about 3, 4, 5, 6, 7, 8, 9, 10, 11, 12, 13, 14, or 15) nucleotides in length, wherein the sense region the antisense region have at least 3 complementary nucleotides, and wherein the siNA can include one or more chemical modifications comprising a structure having any of Formulae I-VII or any combination thereof. In another embodiment, the asymmetric double stranded siNA molecule can also have a 5′-terminal phosphate group that can be chemically modified as described herein (for example a 5′-terminal phosphate group having Formula IV).

[0105] In another embodiment, a siNA molecule of the invention comprises a circular nucleic acid molecule, wherein the siNA is about 38 to about 70 (e.g., about 38, 40, 45, 50, 55, 60, 65, or 70) nucleotides in length having about 15 to about 30 (e.g., about 15, 16, 17, 18, 19, 20, 21, 22, 23, 24, 25, 26, 27, 28, 29, or 30) base pairs, and wherein the siNA can include a chemical modification, which comprises a structure having any of Formulae I-VII or any combination thereof. For example, an exemplary chemically-modified siNA molecule of the invention comprises a circular oligonucleotide having about 42 to about 50 (e.g., about 42, 43, 44, 45, 46, 47, 48, 49, or 50) nucleotides that is chemically-modified with a chemical modification having any of Formulae I-VII or any combination thereof, wherein the circular oligonucleotide forms a dumbbell shaped structure having about 19 base pairs and 2 loops.

[0106] In another embodiment, a circular siNA molecule of the invention contains two loop motifs, wherein one or both loop portions of the siNA molecule is biodegradable. For example, a circular siNA molecule of the invention is designed such that degradation of the loop portions of the siNA molecule in vivo can generate a double-stranded siNA molecule with 3′-terminal overhangs, such as 3′-terminal nucleotide overhangs comprising about 2 nucleotides.

[0107] In one embodiment, a siNA molecule of the invention comprises at least one (e.g., about 1, 2, 3, 4, 5, 6, 7, 8, 9, 10, or more) abasic moiety, for example a compound having Formula V: [chemical structure]
wherein each R3, R4, R5, R6, R7, R8, R10, R11, R12, and R13 is independently H, OH, alkyl, substituted alkyl, alkaryl or aralkyl, F, Cl, Br, CN, CF3, OCF3, OCN, O-alkyl, S-alkyl, N-alkyl, O-alkenyl, S-alkenyl, N-alkenyl, SO-alkyl, alkyl-OSH, alkyl-OH, O-alkyl-OH, O-alkyl-SH, S-alkyl-OH, S-alkyl-SH, alkyl-S-alkyl, alkyl-O-alkyl, ONO2, NO₂, N3, NH2, aminoalkyl, aminoacid, aminoacyl, ONH2, O-aminoalkyl, O-aminoacid, O-aminoacyl, heterocycloalkyl, heterocycloalkaryl, aminoalkylamino, polyalklylamino, substituted silyl, or group having Formula I or II; R9 is O, S, CH2, S═O, CHF, or CF2.

[0108] In one embodiment, a siNA molecule of the invention comprises at least one (e.g., about 1, 2, 3, 4, 5, 6, 7, 8, 9, 10, or more) inverted abasic moiety, for example a compound having Formula VI: [chemical structure]
wherein each R3, R4, R5, R6, R7, R8, R10, R11, R12, and R13 is independently H, OH, alkyl, substituted alkyl, alkaryl or aralkyl, F, Cl, Br, CN, CF3, OCF3, OCN, O-alkyl, S-alkyl, N-alkyl, O-alkenyl, S-alkenyl, N-alkenyl, SO-alkyl, alkyl-OSH, alkyl-OH, O-alkyl-OH, O-alkyl-SH, S-alkyl-OH, S-alkyl-SH, alkyl-S-alkyl, alkyl-O-alkyl, ONO2, NO₂, N3, NH2, aminoalkyl, aminoacid, aminoacyl, ONH2, O-aminoalkyl, O-aminoacid, O-aminoacyl, heterocycloalkyl, heterocycloalkaryl, aminoalkylamino, polyalklylamino, substituted silyl, or group having Formula I or II; R9 is O, S, CH2, S═O, CHF, or CF2, and either R2, R3, R8 or R13 serve as points of attachment to the siNA molecule of the invention.

[0109] In another embodiment, a siNA molecule of the invention comprises at least one (e.g., about 1, 2, 3, 4, 5, 6, 7, 8, 9, 10, or more) substituted polyalkyl moieties, for example a compound having Formula VII: [chemical structure]
wherein each n is independently an integer from 1 to 12, each R1, R2 and R3 is independently H, OH, alkyl, substituted alkyl, alkaryl or aralkyl, F, Cl, Br, CN, CF3, OCF3, OCN, O-alkyl, S-alkyl, N-alkyl, O-alkenyl, S-alkenyl, N-alkenyl, SO-alkyl, alkyl-OSH, alkyl-OH, O-alkyl-OH, O-alkyl-SH, S-alkyl-OH, S-alkyl-SH, alkyl-S-alkyl, alkyl-O-alkyl, ONO2, NO₂, N3, NH2, aminoalkyl, aminoacid, aminoacyl, ONH2, O-aminoalkyl, O-aminoacid, O-aminoacyl, heterocycloalkyl, heterocycloalkaryl, aminoalkylamino, polyalklylamino, substituted silyl, or a group having Formula I, and R1, R2 or R3 serves as points of attachment to the siNA molecule of the invention.

[0110] In another embodiment, the invention features a compound having Formula VII, wherein R1 and R2 are hydroxyl (OH) groups, n=1, and R3 comprises O and is the point of attachment to the 3′-end, the 5′-end, or both of the 3′ and 5′-ends of one or both strands of a double-stranded siNA molecule of the invention or to a single-stranded siNA molecule of the invention. This modification is referred to herein as “glyceryl” (for example modification 6 in FIG. 10).

[0111] In another embodiment, a chemically modified nucleoside or non-nucleoside (e.g. a moiety having any of Formula V, VI or VII) of the invention is at the 3′-end, the 5′-end, or both of the 3′ and 5′-ends of a siNA molecule of the invention. For example, chemically modified nucleoside or non-nucleoside (e.g., a moiety having Formula V, VI or VII) can be present at the 3′-end, the 5′-end, or both of the 3′ and 5′-ends of the antisense strand, the sense strand, or both antisense and sense strands of the siNA molecule. In one embodiment, the chemically modified nucleoside or non-nucleoside (e.g., a moiety having Formula V, VI or VII) is present at the 5′-end and 3′-end of the sense strand and the 3′-end of the antisense strand of a double stranded siNA molecule of the invention. In one embodiment, the chemically modified nucleoside or non-nucleoside (e.g., a moiety having Formula V, VI or VII) is present at the terminal position of the 5′-end and 3′-end of the sense strand and the 3′-end of the antisense strand of a double stranded siNA molecule of the invention. In one embodiment, the chemically modified nucleoside or non-nucleoside (e.g., a moiety having Formula V, VI or VII) is present at the two terminal positions of the 5′-end and 3′-end of the sense strand and the 3′-end of the antisense strand of a double stranded siNA molecule of the invention. In one embodiment, the chemically modified nucleoside or non-nucleoside (e.g., a moiety having Formula V, VI or VII) is present at the penultimate position of the 5′-end and 3′-end of the sense strand and the 3′-end of the antisense strand of a double stranded siNA molecule of the invention. In addition, a moiety having Formula VII can be present at the 3′-end or the 5′-end of a hairpin siNA molecule as described herein.

[0112] In another embodiment, a siNA molecule of the invention comprises an abasic residue having Formula V or VI, wherein the abasic residue having Formula VI or VI is connected to the siNA construct in a 3′-3′,3′-2′,2′-3′, or 5′-5′ configuration, such as at the 3′-end, the 5′-end, or both of the 3′ and 5′-ends of one or both siNA strands.

[0113] In one embodiment, a siNA molecule of the invention comprises one or more (e.g., about 1, 2, 3, 4, 5, 6, 7, 8, 9, 10, or more) locked nucleic acid (LNA) nucleotides, for example, at the 5′-end, the 3′-end, both of the 5′ and 3′-ends, or any combination thereof, of the siNA molecule.

[0114] In one embodiment, a siNA molecule of the invention comprises one or more (e.g., about 1, 2, 3, 4, 5, 6, 7, 8, 9, 10, or more) 4′-thio nucleotides, for example, at the 5′-end, the 3′-end, both of the 5′ and 3′-ends, or any combination thereof, of the siNA molecule.

[0115] In another embodiment, a siNA molecule of the invention comprises one or more (e.g., about 1, 2, 3, 4, 5, 6, 7, 8, 9, 10, or more) acyclic nucleotides, for example, at the 5′-end, the 3′-end, both of the 5′ and 3′-ends, or any combination thereof, of the siNA molecule.

[0116] In one embodiment, the invention features a chemically-modified short interfering nucleic acid (siNA) molecule of the invention comprising a sense region, wherein any (e.g., one or more or all) pyrimidine nucleotides present in the sense region are 2′-deoxy-2′-fluoro pyrimidine nucleotides (e.g., wherein all pyrimidine nucleotides are 2′-deoxy-2′-fluoro pyrimidine nucleotides or alternately a plurality of pyrimidine nucleotides are 2′-deoxy-2′-fluoro pyrimidine nucleotides), and wherein any (e.g., one or more or all) purine nucleotides present in the sense region are 2′-deoxy purine nucleotides (e.g., wherein all purine nucleotides are 2′-deoxy purine nucleotides or alternately a plurality of purine nucleotides are 2′-deoxy purine nucleotides).

[0117] In one embodiment, the invention features a chemically-modified short interfering nucleic acid (siNA) molecule of the invention comprising a sense region, wherein any (e.g., one or more or all) pyrimidine nucleotides present in the sense region are 2′-deoxy-2′-fluoro, 4′-thio, 2′-O-trifluoromethyl, 2′-O-ethyl-trifluoromethoxy, or 2′-O-difluoromethoxy-ethoxy pyrimidine nucleotides (e.g., wherein all pyrimidine nucleotides are 2′-deoxy-2′-fluoro, 4′-thio, 2′-O-trifluoromethyl, 2′-O-ethyl-trifluoromethoxy, or 2′-O-difluoromethoxy-ethoxy pyrimidine nucleotides or alternately a plurality of pyrimidine nucleotides are 2′-deoxy-2′-fluoro, 4′-thio, 2′-O-trifluoromethyl, 2′-O-ethyl-trifluoromethoxy, or 2′-O-difluoromethoxy-ethoxy pyrimidine nucleotides), and wherein any (e.g., one or more or all) purine nucleotides present in the sense region are 2′-deoxy purine nucleotides (e.g., wherein all purine nucleotides are 2′-deoxy purine nucleotides or alternately a plurality of purine nucleotides are 2′-deoxy purine nucleotides), wherein any nucleotides comprising a 3′-terminal nucleotide overhang that are present in said sense region are 2′-deoxy nucleotides.

[0118] In one embodiment, the invention features a chemically-modified short interfering nucleic acid (siNA) molecule of the invention comprising a sense region, wherein any (e.g., one or more or all) pyrimidine nucleotides present in the sense region are 2′-deoxy-2′-fluoro, 4′-thio, 2′-O-trifluoromethyl, 2′-O-ethyl-trifluoromethoxy, or 2′-O-difluoromethoxy-ethoxy pyrimidine nucleotides (e.g., wherein all pyrimidine nucleotides are 2′-deoxy-2′-fluoro, 4′-thio, 2′-O-trifluoromethyl, 2′-O-ethyl-trifluoromethoxy, or 2′-O-difluoromethoxy-ethoxy pyrimidine nucleotides or alternately a plurality of pyrimidine nucleotides are 2′-deoxy-2′-fluoro, 4′-thio, 2′-O-trifluoromethyl, 2′-O-ethyl-trifluoromethoxy, or 2′-O-difluoromethoxy-ethoxy pyrimidine nucleotides), and wherein any (e.g., one or more or all) purine nucleotides present in the sense region are 2′-O-methyl purine nucleotides (e.g., wherein all purine nucleotides are 2′-O-methyl purine nucleotides or alternately a plurality of purine nucleotides are 2′-O-methyl purine nucleotides).

[0119] In one embodiment, the invention features a chemically-modified short interfering nucleic acid (siNA) molecule of the invention comprising a sense region, wherein any (e.g., one or more or all) pyrimidine nucleotides present in the sense region are 2′-deoxy-2′-fluoro, 4′-thio, 2′-O-trifluoromethyl, 2′-O-ethyl-trifluoromethoxy, or 2′-O-difluoromethoxy-ethoxy pyrimidine nucleotides (e.g., wherein all pyrimidine nucleotides are 2′-deoxy-2′-fluoro, 4′-thio, 2′-O-trifluoromethyl, 2′-O-ethyl-trifluoromethoxy, or 2′-O-difluoromethoxy-ethoxy pyrimidine nucleotides or alternately a plurality of pyrimidine nucleotides are 2′-deoxy-2′-fluoro, 4′-thio, 2′-O-trifluoromethyl, 2′-O-ethyl-trifluoromethoxy, or 2′-O-difluoromethoxy-ethoxy pyrimidine nucleotides), wherein any (e.g., one or more or all) purine nucleotides present in the sense region are 2′-O-methyl, 4-thio, 2′-O-trifluoromethyl, 2′-O-ethyl-trifluoromethoxy, or 2′-O-difluoromethoxy-ethoxy purine nucleotides (e.g., wherein all purine nucleotides are 2′-O-methyl, 4-thio, 2′-O-trifluoromethyl, 2′-O-ethyl-trifluoromethoxy, or 2′-O-difluoromethoxy-ethoxy purine nucleotides or alternately a plurality of purine nucleotides are 2′-O-methyl, 4-thio, 2′-O-trifluoromethyl, 2′-O-ethyl-trifluoromethoxy, or 2′-O-difluoromethoxy-ethoxy purine nucleotides), and wherein any nucleotides comprising a 3′-terminal nucleotide overhang that are present in said sense region are 2′-deoxy nucleotides.

[0120] In one embodiment, the invention features a chemically-modified short interfering nucleic acid (siNA) molecule of the invention comprising an antisense region, wherein any (e.g., one or more or all) pyrimidine nucleotides present in the antisense region are 2′-deoxy-2′-fluoro, 4′-thio, 2′-O-trifluoromethyl, 2′-O-ethyl-trifluoromethoxy, or 2′-O-difluoromethoxy-ethoxy pyrimidine nucleotides (e.g., wherein all pyrimidine nucleotides are 2′-deoxy-2′-fluoro, 4′-thio, 2′-O-trifluoromethyl, 2′-O-ethyl-trifluoromethoxy, or 2′-O-difluoromethoxy-ethoxy pyrimidine nucleotides or alternately a plurality of pyrimidine nucleotides are 2′-deoxy-2′-fluoro, 4′-thio, 2′-O-trifluoromethyl, 2′-O-ethyl-trifluoromethoxy, or 2′-O-difluoromethoxy-ethoxy pyrimidine nucleotides), and wherein any (e.g., one or more or all) purine nucleotides present in the antisense region are 2′-O-methyl, 4-thio, 2′-O-trifluoromethyl, 2′-O-ethyl-trifluoromethoxy, or 2′-O-difluoromethoxy-ethoxy purine nucleotides (e.g., wherein all purine nucleotides are 2′-O-methyl, 4-thio, 2′-O-trifluoromethyl, 2′-O-ethyl-trifluoromethoxy, or 2′-O-difluoromethoxy-ethoxy purine nucleotides or alternately a plurality of purine nucleotides are 2′-O-methyl, 4-thio, 2′-O-trifluoromethyl, 2′-O-ethyl-trifluoromethoxy, or 2′-O-difluoromethoxy-ethoxy purine nucleotides).

[0121] In one embodiment, the invention features a chemically-modified short interfering nucleic acid (siNA) molecule of the invention comprising an antisense region, wherein any (e.g., one or more or all) pyrimidine nucleotides present in the antisense region are 2′-deoxy-2′-fluoro, 4′-thio, 2′-O-trifluoromethyl, 2′-O-ethyl-trifluoromethoxy, or 2′-O-difluoromethoxy-ethoxy pyrimidine nucleotides (e.g., wherein all pyrimidine nucleotides are 2′-deoxy-2′-fluoro, 4′-thio, 2′-O-trifluoromethyl, 2′-O-ethyl-trifluoromethoxy, or 2′-O-difluoromethoxy-ethoxy pyrimidine nucleotides or alternately a plurality of pyrimidine nucleotides are 2′-deoxy-2′-fluoro, 4′-thio, 2′-O-trifluoromethyl, 2′-O-ethyl-trifluoromethoxy, or 2′-O-difluoromethoxy-ethoxy pyrimidine nucleotides), wherein any (e.g., one or more or all) purine nucleotides present in the antisense region are 2′-O-methyl, 4-thio, 2′-O-trifluoromethyl, 2′-O-ethyl-trifluoromethoxy, or 2′-O-difluoromethoxy-ethoxy purine nucleotides (e.g., wherein all purine nucleotides are 2′-O-methyl, 4-thio, 2′-O-trifluoromethyl, 2′-O-ethyl-trifluoromethoxy, or 2′-O-difluoromethoxy-ethoxy purine nucleotides or alternately a plurality of purine nucleotides are 2′-O-methyl, 4-thio, 2′-O-trifluoromethyl, 2′-O-ethyl-trifluoromethoxy, or 2′-O-difluoromethoxy-ethoxy purine nucleotides), and wherein any nucleotides comprising a 3′-terminal nucleotide overhang that are present in said antisense region are 2′-deoxy nucleotides.

[0122] In one embodiment, the invention features a chemically-modified short interfering nucleic acid (siNA) molecule of the invention comprising an antisense region, wherein any (e.g., one or more or all) pyrimidine nucleotides present in the antisense region are 2′-deoxy-2′-fluoro, 4′-thio, 2′-O-trifluoromethyl, 2′-O-ethyl-trifluoromethoxy, or 2′-O-difluoromethoxy-ethoxy pyrimidine nucleotides (e.g., wherein all pyrimidine nucleotides are 2′-deoxy-2′-fluoro, 4′-thio, 2′-O-trifluoromethyl, 2′-O-ethyl-trifluoromethoxy, or 2′-O-difluoromethoxy-ethoxy pyrimidine nucleotides or alternately a plurality of pyrimidine nucleotides are 2′-deoxy-2′-fluoro, 4′-thio, 2′-O-trifluoromethyl, 2′-O-ethyl-trifluoromethoxy, or 2′-O-difluoromethoxy-ethoxy pyrimidine nucleotides), and wherein any (e.g., one or more or all) purine nucleotides present in the antisense region are 2′-deoxy purine nucleotides (e.g., wherein all purine nucleotides are 2′-deoxy purine nucleotides or alternately a plurality of purine nucleotides are 2′-deoxy purine nucleotides).

[0123] In one embodiment, the invention features a chemically-modified short interfering nucleic acid (siNA) molecule of the invention comprising an antisense region, wherein any (e.g., one or more or all) pyrimidine nucleotides present in the antisense region are 2′-deoxy-2′-fluoro, 4′-thio, 2′-O-trifluoromethyl, 2′-O-ethyl-trifluoromethoxy, or 2′-O-difluoromethoxy-ethoxy pyrimidine nucleotides (e.g., wherein all pyrimidine nucleotides are 2′-deoxy-2′-fluoro, 4′-thio, 2′-O-trifluoromethyl, 2′-O-ethyl-trifluoromethoxy, or 2′-O-difluoromethoxy-ethoxy pyrimidine nucleotides or alternately a plurality of pyrimidine nucleotides are 2′-deoxy-2′-fluoro, 4′-thio, 2′-O-trifluoromethyl, 2′-O-ethyl-trifluoromethoxy, or 2′-O-difluoromethoxy-ethoxy pyrimidine nucleotides), and wherein any (e.g., one or more or all) purine nucleotides present in the antisense region are 2′-O-methyl, 4-thio, 2′-O-trifluoromethyl, 2′-O-ethyl-trifluoromethoxy, or 2′-O-difluoromethoxy-ethoxy purine nucleotides (e.g., wherein all purine nucleotides are 2′-O-methyl, 4-thio, 2′-O-trifluoromethyl, 2′-O-ethyl-trifluoromethoxy, or 2′-O-difluoromethoxy-ethoxy purine nucleotides or alternately a plurality of purine nucleotides are 2′-O-methyl, 4-thio, 2′-O-trifluoromethyl, 2′-O-ethyl-trifluoromethoxy, or 2′-O-difluoromethoxy-ethoxy purine nucleotides).

[0124] In one embodiment, the invention features a chemically-modified short interfering nucleic acid (siNA) molecule of the invention capable of mediating RNA interference (RNAi) against VEGF and/or VEGFR inside a cell or reconstituted in vitro system comprising a sense region, wherein one or more pyrimidine nucleotides present in the sense region are 2′-deoxy-2′-fluoro, 4′-thio, 2′-O-trifluoromethyl, 2′-O-ethyl-trifluoromethoxy, or 2′-O-difluoromethoxy-ethoxy pyrimidine nucleotides (e.g., wherein all pyrimidine nucleotides are 2′-deoxy-2′-fluoro, 4′-thio, 2′-O-trifluoromethyl, 2′-O-ethyl-trifluoromethoxy, or 2′-O-difluoromethoxy-ethoxy pyrimidine nucleotides or alternately a plurality of pyrimidine nucleotides are 2′-deoxy-2′-fluoro, 4′-thio, 2′-O-trifluoromethyl, 2′-O-ethyl-trifluoromethoxy, or 2′-O-difluoromethoxy-ethoxy pyrimidine nucleotides), and one or more purine nucleotides present in the sense region are 2′-deoxy purine nucleotides (e.g., wherein all purine nucleotides are 2′-deoxy purine nucleotides or alternately a plurality of purine nucleotides are 2′-deoxy purine nucleotides), and an antisense region, wherein one or more pyrimidine nucleotides present in the antisense region are 2′-deoxy-2′-fluoro, 4′-thio, 2′-O-trifluoromethyl, 2′-O-ethyl-trifluoromethoxy, or 2′-O-difluoromethoxy-ethoxy pyrimidine nucleotides (e.g., wherein all pyrimidine nucleotides are 2′-deoxy-2′-fluoro, 4′-thio, 2′-O-trifluoromethyl, 2′-O-ethyl-trifluoromethoxy, or 2′-O-difluoromethoxy-ethoxy pyrimidine nucleotides or alternately a plurality of pyrimidine nucleotides are 2′-deoxy-2′-fluoro, 4′-thio, 2′-O-trifluoromethyl, 2′-O-ethyl-trifluoromethoxy, or 2′-O-difluoromethoxy-ethoxy pyrimidine nucleotides), and one or more purine nucleotides present in the antisense region are 2′-O-methyl, 4-thio, 2′-O-trifluoromethyl, 2′-O-ethyl-trifluoromethoxy, or 2′-O-difluoromethoxy-ethoxy purine nucleotides (e.g., wherein all purine nucleotides are 2′-O-methyl, 4-thio, 2′-O-trifluoromethyl, 2′-O-ethyl-trifluoromethoxy, or 2′-O-difluoromethoxy-ethoxy purine nucleotides or alternately a plurality of purine nucleotides are 2′-O-methyl, 4-thio, 2′-O-trifluoromethyl, 2′-O-ethyl-trifluoromethoxy, or 2′-O-difluoromethoxy-ethoxy purine nucleotides). The sense region and/or the antisense region can have a terminal cap modification, such as any modification described herein or shown in FIG. 10, that is optionally present at the 3′-end, the 5′-end, or both of the 3′ and 5′-ends of the sense and/or antisense sequence. The sense and/or antisense region can optionally further comprise a 3′-terminal nucleotide overhang having about 1 to about 4 (e.g., about 1, 2, 3, or 4) 2′-deoxynucleotides. The overhang nucleotides can further comprise one or more (e.g., about 1, 2, 3, 4 or more) phosphorothioate, phosphonoacetate, and/or thiophosphonoacetate internucleotide linkages. Non-limiting examples of these chemically-modified siNAs are shown in FIGS. 4 and 5 and Tables III and IV herein. In any of these described embodiments, the purine nucleotides present in the sense region are alternatively 2′-O-methyl, 4-thio, 2′-O-trifluoromethyl, 2′-O-ethyl-trifluoromethoxy, or 2′-O-difluoromethoxy-ethoxy purine nucleotides (e.g., wherein all purine nucleotides are 2′-O-methyl, 4-thio, 2′-O-trifluoromethyl, 2′-O-ethyl-trifluoromethoxy, or 2′-O-difluoromethoxy-ethoxy purine nucleotides or alternately a plurality of purine nucleotides are 2′-O-methyl, 4-thio, 2′-O-trifluoromethyl, 2′-O-ethyl-trifluoromethoxy, or 2′-O-difluoromethoxy-ethoxy purine nucleotides) and one or more purine nucleotides present in the antisense region are 2′-O-methyl, 4-thio, 2′-O-trifluoromethyl, 2′-O-ethyl-trifluoromethoxy, or 2′-O-difluoromethoxy-ethoxy purine nucleotides (e.g., wherein all purine nucleotides are 2′-O-methyl, 4-thio, 2′-O-trifluoromethyl, 2′-O-ethyl-trifluoromethoxy, or 2′-O-difluoromethoxy-ethoxy purine nucleotides or alternately a plurality of purine nucleotides are 2′-O-methyl, 4-thio, 2′-O-trifluoromethyl, 2′-O-ethyl-trifluoromethoxy, or 2′-O-difluoromethoxy-ethoxy purine nucleotides). Also, in any of these embodiments, one or more purine nucleotides present in the sense region are alternatively purine ribonucleotides (e.g., wherein all purine nucleotides are purine ribonucleotides or alternately a plurality of purine nucleotides are purine ribonucleotides) and any purine nucleotides present in the antisense region are 2′-O-methyl, 4-thio, 2′-O-trifluoromethyl, 2′-O-ethyl-trifluoromethoxy, or 2′-O-difluoromethoxy-ethoxy purine nucleotides (e.g., wherein all purine nucleotides are 2′-O-methyl, 4-thio, 2′-O-trifluoromethyl, 2′-O-ethyl-trifluoromethoxy, or 2′-O-difluoromethoxy-ethoxy purine nucleotides or alternately a plurality of purine nucleotides are 2′-O-methyl, 4-thio, 2′-O-trifluoromethyl, 2′-O-ethyl-trifluoromethoxy, or 2′-O-difluoromethoxy-ethoxy purine nucleotides). Additionally, in any of these embodiments, one or more purine nucleotides present in the sense region and/or present in the antisense region are alternatively selected from the group consisting of 2′-deoxy nucleotides, locked nucleic acid (LNA) nucleotides, 2′-methoxyethyl nucleotides, 4′-thionucleotides, 2′-O-trifluoromethyl nucleotides, 2′-O-ethyl-trifluoromethoxy nucleotides, 2′-O-difluoromethoxy-ethoxy nucleotides and 2′-O-methyl nucleotides (e.g., wherein all purine nucleotides are selected from the group consisting of 2′-deoxy nucleotides, locked nucleic acid (LNA) nucleotides, 2′-methoxyethyl nucleotides, 4′-thionucleotides, 2′-O-trifluoromethyl nucleotides, 2′-O-ethyl-trifluoromethoxy nucleotides, 2′-O-difluoromethoxy-ethoxy nucleotides and 2′-O-methyl nucleotides or alternately a plurality of purine nucleotides are selected from the group consisting of 2′-deoxy nucleotides, locked nucleic acid (LNA) nucleotides, 2′-methoxyethyl nucleotides, 4′-thionucleotides, 2′-O-trifluoromethyl nucleotides, 2′-O-ethyl-trifluoromethoxy nucleotides, 2′-O-difluoromethoxy-ethoxy nucleotides and 2′-O-methyl nucleotides).

[0125] In another embodiment, any modified nucleotides present in the siNA molecules of the invention, preferably in the antisense strand of the siNA molecules of the invention, but also optionally in the sense and/or both antisense and sense strands, comprise modified nucleotides having properties or characteristics similar to naturally occurring ribonucleotides. For example, the invention features siNA molecules including modified nucleotides having a Northern conformation (e.g., Northern pseudorotation cycle, see for example Saenger, Principles of Nucleic Acid Structure, Springer-Verlag ed., 1984). As such, chemically modified nucleotides present in the siNA molecules of the invention, preferably in the antisense strand of the siNA molecules of the invention, but also optionally in the sense and/or both antisense and sense strands, are resistant to nuclease degradation while at the same time maintaining the capacity to mediate RNAi. Non-limiting examples of nucleotides having a northern configuration include locked nucleic acid (LNA) nucleotides (e.g., 2′-O, 4′-C-methylene-(D-ribofuranosyl) nucleotides); 2′-methoxyethoxy (MOE) nucleotides; 2′-methyl-thio-ethyl, 2′-deoxy-2′-fluoro nucleotides, 2′-deoxy-2′-chloro nucleotides, 2′-azido nucleotides, 2′-O-trifluoromethyl nucleotides, 2′-O-ethyl-trifluoromethoxy nucleotides, 2′-O-difluoromethoxy-ethoxy nucleotides, 4′thio nucleotides and 2′-O-methyl nucleotides.

[0126] In one embodiment, the sense strand of a double stranded siNA molecule of the invention comprises a terminal cap moiety, (see for example FIG. 10) such as an inverted deoxyabaisc moiety, at the 3′-end, 5′-end, or both 3′ and 5′-ends of the sense strand.

[0127] In one embodiment, the invention features a chemically-modified short interfering nucleic acid molecule (siNA) capable of mediating RNA interference (RNAi) against VEGF and/or VEGFR inside a cell or reconstituted in vitro system, wherein the chemical modification comprises a conjugate covalently attached to the chemically-modified siNA molecule. Non-limiting examples of conjugates contemplated by the invention include conjugates and ligands described in Vargeese et al., U.S. Ser. No. 10/427,160, filed Apr. 30, 2003, incorporated by reference herein in its entirety, including the drawings. In another embodiment, the conjugate is covalently attached to the chemically-modified siNA molecule via a biodegradable linker. In one embodiment, the conjugate molecule is attached at the 3′-end of either the sense strand, the antisense strand, or both strands of the chemically-modified siNA molecule. In another embodiment, the conjugate molecule is attached at the 5′-end of either the sense strand, the antisense strand, or both strands of the chemically-modified siNA molecule. In yet another embodiment, the conjugate molecule is attached both the 3′-end and 5′-end of either the sense strand, the antisense strand, or both strands of the chemically-modified siNA molecule, or any combination thereof. In one embodiment, a conjugate molecule of the invention comprises a molecule that facilitates delivery of a chemically-modified siNA molecule into a biological system, such as a cell. In another embodiment, the conjugate molecule attached to the chemically-modified siNA molecule is a polyethylene glycol, human serum albumin, or a ligand for a cellular receptor that can mediate cellular uptake. Examples of specific conjugate molecules contemplated by the instant invention that can be attached to chemically-modified siNA molecules are described in Vargeese et al., U.S. Ser. No. 10/201,394, filed Jul. 22, 2002 incorporated by reference herein. The type of conjugates used and the extent of conjugation of siNA molecules of the invention can be evaluated for improved pharmacokinetic profiles, bioavailability, and/or stability of siNA constructs while at the same time maintaining the ability of the siNA to mediate RNAi activity. As such, one skilled in the art can screen siNA constructs that are modified with various conjugates to determine whether the siNA conjugate complex possesses improved properties while maintaining the ability to mediate RNAi, for example in animal models as are generally known in the art.

[0128] In one embodiment, the invention features a short interfering nucleic acid (siNA) molecule of the invention, wherein the siNA further comprises a nucleotide, non-nucleotide, or mixed nucleotide/non-nucleotide linker that joins the sense region of the siNA to the antisense region of the siNA. In one embodiment, a nucleotide linker of the invention can be a linker of ≧2 nucleotides in length, for example about 3, 4, 5, 6, 7, 8, 9, or 10 nucleotides in length. In another embodiment, the nucleotide linker can be a nucleic acid aptamer. By “aptamer” or “nucleic acid aptamer” as used herein is meant a nucleic acid molecule that binds specifically to a target molecule wherein the nucleic acid molecule has sequence that comprises a sequence recognized by the target molecule in its natural setting. Alternately, an aptamer can be a nucleic acid molecule that binds to a target molecule where the target molecule does not naturally bind to a nucleic acid. The target molecule can be any molecule of interest. For example, the aptamer can be used to bind to a ligand-binding domain of a protein, thereby preventing interaction of the naturally occurring ligand with the protein. This is a non-limiting example and those in the art will recognize that other embodiments can be readily generated using techniques generally known in the art. (See, for example, Gold et al., 1995, Annu. Rev. Biochem., 64, 763; Brody and Gold, 2000, J. Biotechnol., 74, 5; Sun, 2000, Curr. Opin. Mol. Ther., 2, 100; Kusser, 2000, J. Biotechnol., 74, 27; Hermann and Patel, 2000, Science, 287, 820; and Jayasena, 1999, Clinical Chemistry, 45, 1628.)

[0129] In yet another embodiment, a non-nucleotide linker of the invention comprises abasic nucleotide, polyether, polyamine, polyamide, peptide, carbohydrate, lipid, polyhydrocarbon, or other polymeric compounds (e.g. polyethylene glycols such as those having between 2 and 100 ethylene glycol units). Specific examples include those described by Seela and Kaiser, Nucleic Acids Res. 1990, 18:6353 and Nucleic Acids Res. 1987, 15:3113; Cload and Schepartz, J. Am. Chem. Soc. 1991, 113:6324; Richardson and Schepartz, J. Am. Chem. Soc. 1991, 113:5109; Ma et al., Nucleic Acids Res. 1993, 21:2585 and Biochemistry 1993, 32:1751; Durand et al., Nucleic Acids Res. 1990, 18:6353; McCurdy et al., Nucleosides & Nucleotides 1991, 10:287; Jschke et al., Tetrahedron Lett. 1993, 34:301; Ono et al., Biochemistry 1991, 30:9914; Arnold et al., International Publication No. WO 89/02439; Usman et al., International Publication No. WO 95/06731; Dudycz et al., International Publication No. WO 95/11910 and Ferentz and Verdine, J. Am. Chem. Soc. 1991, 113:4000, all hereby incorporated by reference herein. A “non-nucleotide” further means any group or compound that can be incorporated into a nucleic acid chain in the place of one or more nucleotide units, including either sugar and/or phosphate substitutions, and allows the remaining bases to exhibit their enzymatic activity. The group or compound can be abasic in that it does not contain a commonly recognized nucleotide base, such as adenosine, guanine, cytosine, uracil or thymine, for example at the C1 position of the sugar.

[0130] In one embodiment, the invention features a short interfering nucleic acid (siNA) molecule capable of mediating RNA interference (RNAi) inside a cell or reconstituted in vitro system, wherein one or both strands of the siNA molecule that are assembled from two separate oligonucleotides do not comprise any ribonucleotides. For example, a siNA molecule can be assembled from a single oligonculeotide where the sense and antisense regions of the siNA comprise separate oligonucleotides that do not have any ribonucleotides (e.g., nucleotides having a 2′-OH group) present in the oligonucleotides. In another example, a siNA molecule can be assembled from a single oligonculeotide where the sense and antisense regions of the siNA are linked or circularized by a nucleotide or non-nucleotide linker as described herein, wherein the oligonucleotide does not have any ribonucleotides (e.g., nucleotides having a 2′-OH group) present in the oligonucleotide. Applicant has surprisingly found that the presense of ribonucleotides (e.g., nucleotides having a 2′-hydroxyl group) within the siNA molecule is not required or essential to support RNAi activity. As such, in one embodiment, all positions within the siNA can include chemically modified nucleotides and/or non-nucleotides such as nucleotides and or non-nucleotides having Formula I, II, III, IV, V, VI, or VII or any combination thereof to the extent that the ability of the siNA molecule to support RNAi activity in a cell is maintained.

[0131] In one embodiment, a siNA molecule of the invention is a single stranded siNA molecule that mediates RNAi activity in a cell or reconstituted in vitro system comprising a single stranded polynucleotide having complementarity to a target nucleic acid sequence. In another embodiment, the single stranded siNA molecule of the invention comprises a 5′-terminal phosphate group. In another embodiment, the single stranded siNA molecule of the invention comprises a 5′-terminal phosphate group and a 3′-terminal phosphate group (e.g., a 2′,3′-cyclic phosphate). In another embodiment, the single stranded siNA molecule of the invention comprises about 15 to about 30 (e.g., about 15, 16, 17, 18, 19, 20, 21, 22, 23, 24, 25, 26, 27, 28, 29, or 30) nucleotides. In yet another embodiment, the single stranded siNA molecule of the invention comprises one or more chemically modified nucleotides or non-nucleotides described herein. For example, all the positions within the siNA molecule can include chemically-modified nucleotides such as nucleotides having any of Formulae I-VII, or any combination thereof to the extent that the ability of the siNA molecule to support RNAi activity in a cell is maintained.

[0132] In one embodiment, a siNA molecule of the invention is a single stranded siNA molecule that mediates RNAi activity in a cell or reconstituted in vitro system comprising a single stranded polynucleotide having complementarity to a target nucleic acid sequence, wherein one or more pyrimidine nucleotides present in the siNA are 2′-deoxy-2′-fluoro pyrimidine nucleotides (e.g., wherein all pyrimidine nucleotides are 2′-deoxy-2′-fluoro, 4′-thio, 2′-O-trifluoromethyl, 2′-O-ethyl-trifluoromethoxy, or 2′-O-difluoromethoxy-ethoxy pyrimidine nucleotides or alternately a plurality of pyrimidine nucleotides are 2′-deoxy-2′-fluoro, 4′-thio, 2′-O-trifluoromethyl, 2′-O-ethyl-trifluoromethoxy, or 2′-O-difluoromethoxy-ethoxy pyrimidine nucleotides), and wherein any purine nucleotides present in the antisense region are 2′-O-methyl, 4-thio, 2′-O-trifluoromethyl, 2′-O-ethyl-trifluoromethoxy, or 2′-O-difluoromethoxy-ethoxy purine nucleotides (e.g., wherein all purine nucleotides are 2′-O-methyl, 4-thio, 2′-O-trifluoromethyl, 2′-O-ethyl-trifluoromethoxy, or 2′-O-difluoromethoxy-ethoxy purine nucleotides or alternately a plurality of purine nucleotides are 2′-O-methyl, 4-thio, 2′-O-trifluoromethyl, 2′-O-ethyl-trifluoromethoxy, or 2′-O-difluoromethoxy-ethoxy purine nucleotides), and a terminal cap modification, such as any modification described herein or shown in FIG. 10, that is optionally present at the 3′-end, the 5′-end, or both of the 3′ and 5′-ends of the antisense sequence. The siNA optionally further comprises about 1 to about 4 or more (e.g., about 1, 2, 3, 4 or more) terminal 2′-deoxynucleotides at the 3′-end of the siNA molecule, wherein the terminal nucleotides can further comprise one or more (e.g., 1, 2, 3, 4 or more) phosphorothioate, phosphonoacetate, and/or thiophosphonoacetate internucleotide linkages, and wherein the siNA optionally further comprises a terminal phosphate group, such as a 5′-terminal phosphate group. In any of these embodiments, any purine nucleotides present in the antisense region are alternatively 2′-deoxy purine nucleotides (e.g., wherein all purine nucleotides are 2′-deoxy purine nucleotides or alternately a plurality of purine nucleotides are 2′-deoxy purine nucleotides). Also, in any of these embodiments, any purine nucleotides present in the siNA (i.e., purine nucleotides present in the sense and/or antisense region) can alternatively be locked nucleic acid (LNA) nucleotides (e.g., wherein all purine nucleotides are LNA nucleotides or alternately a plurality of purine nucleotides are LNA nucleotides). Also, in any of these embodiments, any purine nucleotides present in the siNA are alternatively 2′-methoxyethyl purine nucleotides (e.g., wherein all purine nucleotides are 2′-methoxyethyl purine nucleotides or alternately a plurality of purine nucleotides are 2′-methoxyethyl purine nucleotides). In another embodiment, any modified nucleotides present in the single stranded siNA molecules of the invention comprise modified nucleotides having properties or characteristics similar to naturally occurring ribonucleotides. For example, the invention features siNA molecules including modified nucleotides having a Northern conformation (e.g., Northern pseudorotation cycle, see for example Saenger, Principles of Nucleic Acid Structure, Springer-Verlag ed., 1984). As such, chemically modified nucleotides present in the single stranded siNA molecules of the invention are preferably resistant to nuclease degradation while at the same time maintaining the capacity to mediate RNAi.

[0133] In one embodiment, a siNA molecule of the invention comprises chemically modified nucleotides or non-nucleotides (e.g., having any of Formulae I-VII, such as 2′-deoxy, 2′-deoxy-2′-fluoro, 4′-thio, 2′-O-trifluoromethyl, 2′-O-ethyl-trifluoromethoxy, 2′-O-difluoromethoxy-ethoxy or 2′-O-methyl nucleotides) at alternating positions within one or more strands or regions of the siNA molecule. For example, such chemical modifications can be introduced at every other position of a RNA based siNA molecule, starting at either the first or second nucleotide from the 3′-end or 5′-end of the siNA. In a non-limiting example, a double stranded siNA molecule of the invention in which each strand of the siNA is 21 nucleotides in length is featured wherein positions 1, 3, 5, 7, 9, 11, 13, 15, 17, 19 and 21 of each strand are chemically modified (e.g., with compounds having any of Formulae 1-VII, such as such as 2′-deoxy, 2′-deoxy-2′-fluoro, 4′-thio, 2′-O-trifluoromethyl, 2′-O-ethyl-trifluoromethoxy, 2′-O-difluoromethoxy-ethoxy or 2′-O-methyl nucleotides). In another non-limiting example, a double stranded siNA molecule of the invention in which each strand of the siNA is 21 nucleotides in length is featured wherein positions 2, 4, 6, 8, 10, 12, 14, 16, 18, and 20 of each strand are chemically modified (e.g., with compounds having any of Formulae 1-VII, such as such as 2′-deoxy, 2′-deoxy-2′-fluoro, 4′-thio, 2′-O-trifluoromethyl, 2′-O-ethyl-trifluoromethoxy, 2′-O-difluoromethoxy-ethoxy or 2′-O-methyl nucleotides). Such siNA molecules can further comprise terminal cap moieties and/or backbone modifications as described herein.

[0134] In one embodiment, the invention features a method for modulating the expression of a VEGF and/or VEGFR gene within a cell comprising: (a) synthesizing a siNA molecule of the invention, which can be chemically-modified, wherein one of the siNA strands comprises a sequence complementary to RNA of the VEGF and/or VEGFR gene; and (b) introducing the siNA molecule into a cell under conditions suitable to modulate (e.g., inhibit) the expression of the VEGF and/or VEGFR gene in the cell.

[0135] In one embodiment, the invention features a method for modulating the expression of a VEGF and/or VEGFR gene within a cell comprising: (a) synthesizing a siNA molecule of the invention, which can be chemically-modified, wherein one of the siNA strands comprises a sequence complementary to RNA of the VEGF and/or VEGFR gene and wherein the sense strand sequence of the siNA comprises a sequence identical or substantially similar to the sequence of the target RNA; and (b) introducing the siNA molecule into a cell under conditions suitable to modulate (e.g., inhibit) the expression of the VEGF and/or VEGFR gene in the cell.

[0136] In another embodiment, the invention features a method for modulating the expression of more than one VEGF and/or VEGFR gene within a cell comprising: (a) synthesizing siNA molecules of the invention, which can be chemically-modified, wherein one of the siNA strands comprises a sequence complementary to RNA of the VEGF and/or VEGFR genes; and (b) introducing the siNA molecules into a cell under conditions suitable to modulate (e.g., inhibit) the expression of the VEGF and/or VEGFR genes in the cell.

[0137] In another embodiment, the invention features a method for modulating the expression of two or more VEGF and/or VEGFR genes within a cell comprising: (a) synthesizing one or more siNA molecules of the invention, which can be chemically-modified, wherein the siNA strands comprise sequences complementary to RNA of the VEGF and/or VEGFR genes and wherein the sense strand sequences of the siNAs comprise sequences identical or substantially similar to the sequences of the target RNAs; and (b) introducing the siNA molecules into a cell under conditions suitable to modulate (e.g., inhibit) the expression of the VEGF and/or VEGFR genes in the cell.

[0138] In another embodiment, the invention features a method for modulating the expression of more than one VEGF and/or VEGFR gene within a cell comprising: (a) synthesizing a siNA molecule of the invention, which can be chemically-modified, wherein one of the siNA strands comprises a sequence complementary to RNA of the VEGF and/or VEGFR gene and wherein the sense strand sequence of the siNA comprises a sequence identical or substantially similar to the sequences of the target RNAs; and (b) introducing the siNA molecule into a cell under conditions suitable to modulate (e.g., inhibit) the expression of the VEGF and/or VEGFR genes in the cell.

[0139] In one embodiment, siNA molecules of the invention are used as reagents in ex vivo applications. For example, siNA reagents are introduced into tissue or cells that are transplanted into a subject for therapeutic effect. The cells and/or tissue can be derived from an organism or subject that later receives the explant, or can be derived from another organism or subject prior to transplantation. The siNA molecules can be used to modulate the expression of one or more genes in the cells or tissue, such that the cells or tissue obtain a desired phenotype or are able to perform a function when transplanted in vivo. In one embodiment, certain target cells from a patient are extracted. These extracted cells are contacted with siNAs targeting a specific nucleotide sequence within the cells under conditions suitable for uptake of the siNAs by these cells (e.g. using delivery reagents such as cationic lipids, liposomes and the like or using techniques such as electroporation to facilitate the delivery of siNAs into cells). The cells are then reintroduced back into the same patient or other patients. In one embodiment, the invention features a method of modulating the expression of a VEGF and/or VEGFR gene in a tissue explant comprising: (a) synthesizing a siNA molecule of the invention, which can be chemically-modified, wherein one of the siNA strands comprises a sequence complementary to RNA of the VEGF and/or VEGFR gene; and (b) introducing the siNA molecule into a cell of the tissue explant derived from a particular organism under conditions suitable to modulate (e.g., inhibit) the expression of the VEGF and/or VEGFR gene in the tissue explant. In another embodiment, the method further comprises introducing the tissue explant back into the organism the tissue was derived from or into another organism under conditions suitable to modulate (e.g., inhibit) the expression of the VEGF and/or VEGFR gene in that organism.

[0140] In one embodiment, the invention features a method of modulating the expression of a VEGF and/or VEGFR gene in a tissue explant comprising: (a) synthesizing a siNA molecule of the invention, which can be chemically-modified, wherein one of the siNA strands comprises a sequence complementary to RNA of the VEGF and/or VEGFR gene and wherein the sense strand sequence of the siNA comprises a sequence identical or substantially similar to the sequence of the target RNA; and (b) introducing the siNA molecule into a cell of the tissue explant derived from a particular organism under conditions suitable to modulate (e.g., inhibit) the expression of the VEGF and/or VEGFR gene in the tissue explant. In another embodiment, the method further comprises introducing the tissue explant back into the organism the tissue was derived from or into another organism under conditions suitable to modulate (e.g., inhibit) the expression of the VEGF and/or VEGFR gene in that organism.

[0141] In another embodiment, the invention features a method of modulating the expression of more than one VEGF and/or VEGFR gene in a tissue explant comprising: (a) synthesizing siNA molecules of the invention, which can be chemically-modified, wherein one of the siNA strands comprises a sequence complementary to RNA of the VEGF and/or VEGFR genes; and (b) introducing the siNA molecules into a cell of the tissue explant derived from a particular organism under conditions suitable to modulate (e.g., inhibit) the expression of the VEGF and/or VEGFR genes in the tissue explant. In another embodiment, the method further comprises introducing the tissue explant back into the organism the tissue was derived from or into another organism under conditions suitable to modulate (e.g., inhibit) the expression of the VEGF and/or VEGFR genes in that organism.

[0142] In one embodiment, the invention features a method of modulating the expression of a VEGF and/or VEGFR gene in a subject or organism comprising: (a) synthesizing a siNA molecule of the invention, which can be chemically-modified, wherein one of the siNA strands comprises a sequence complementary to RNA of the VEGF and/or VEGFR gene; and (b) introducing the siNA molecule into the subject or organism under conditions suitable to modulate (e.g., inhibit) the expression of the VEGF and/or VEGFR gene in the subject or organism. The level of VEGF and/or VEGFR protein or RNA can be determined using various methods well-known in the art.

[0143] In another embodiment, the invention features a method of modulating the expression of more than one VEGF and/or VEGFR gene in a subject or organism comprising: (a) synthesizing siNA molecules of the invention, which can be chemically-modified, wherein one of the siNA strands comprises a sequence complementary to RNA of the VEGF and/or VEGFR genes; and (b) introducing the siNA molecules into the subject or organism under conditions suitable to modulate (e.g., inhibit) the expression of the VEGF and/or VEGFR genes in the subject or organism. The level of VEGF and/or VEGFR protein or RNA can be determined as is known in the art.

[0144] In one embodiment, the invention features a method for modulating the expression of a VEGF and/or VEGFR gene within a cell comprising: (a) synthesizing a siNA molecule of the invention, which can be chemically-modified, wherein the siNA comprises a single stranded sequence having complementarity to RNA of the VEGF and/or VEGFR gene; and (b) introducing the siNA molecule into a cell under conditions suitable to modulate (e.g., inhibit) the expression of the VEGF and/or VEGFR gene in the cell.

[0145] In another embodiment, the invention features a method for modulating the expression of more than one VEGF and/or VEGFR gene within a cell comprising: (a) synthesizing siNA molecules of the invention, which can be chemically-modified, wherein the siNA comprises a single stranded sequence having complementarity to RNA of the VEGF and/or VEGFR gene; and (b) contacting the cell in vitro or in vivo with the siNA molecule under conditions suitable to modulate (e.g., inhibit) the expression of the VEGF and/or VEGFR genes in the cell.

[0146] In one embodiment, the invention features a method of modulating the expression of a VEGF and/or VEGFR gene in a tissue explant (e.g., a liver transplant) comprising: (a) synthesizing a siNA molecule of the invention, which can be chemically-modified, wherein the siNA comprises a single stranded sequence having complementarity to RNA of the VEGF and/or VEGFR gene; and (b) contacting a cell of the tissue explant derived from a particular subject or organism with the siNA molecule under conditions suitable to modulate (e.g., inhibit) the expression of the VEGF and/or VEGFR gene in the tissue explant. In another embodiment, the method further comprises introducing the tissue explant back into the subject or organism the tissue was derived from or into another subject or organism under conditions suitable to modulate (e.g., inhibit) the expression of the VEGF and/or VEGFR gene in that subject or organism.

[0147] In another embodiment, the invention features a method of modulating the expression of more than one VEGF and/or VEGFR gene in a tissue explant (e.g., a liver transplant) comprising: (a) synthesizing siNA molecules of the invention, which can be chemically-modified, wherein the siNA comprises a single stranded sequence having complementarity to RNA of the VEGF and/or VEGFR gene; and (b) introducing the siNA molecules into a cell of the tissue explant derived from a particular subject or organism under conditions suitable to modulate (e.g., inhibit) the expression of the VEGF and/or VEGFR genes in the tissue explant. In another embodiment, the method further comprises introducing the tissue explant back into the subject or organism the tissue was derived from or into another subject or organism under conditions suitable to modulate (e.g., inhibit) the expression of the VEGF and/or VEGFR genes in that subject or organism.

[0148] In one embodiment, the invention features a method of modulating the expression of a VEGF and/or VEGFR gene in a subject or organism comprising: (a) synthesizing a siNA molecule of the invention, which can be chemically-modified, wherein the siNA comprises a single stranded sequence having complementarity to RNA of the VEGF and/or VEGFR gene; and (b) introducing the siNA molecule into the subject or organism under conditions suitable to modulate (e.g., inhibit) the expression of the VEGF and/or VEGFR gene in the subject or organism.

[0149] In another embodiment, the invention features a method of modulating the expression of more than one VEGF and/or VEGFR gene in a subject or organism comprising: (a) synthesizing siNA molecules of the invention, which can be chemically-modified, wherein the siNA comprises a single stranded sequence having complementarity to RNA of the VEGF and/or VEGFR gene; and (b) introducing the siNA molecules into the subject or organism under conditions suitable to modulate (e.g., inhibit) the expression of the VEGF and/or VEGFR genes in the subject or organism.

[0150] In one embodiment, the invention features a method of modulating the expression of a VEGF and/or VEGFR gene in a subject or organism comprising contacting the subject or organism with a siNA molecule of the invention under conditions suitable to modulate (e.g., inhibit) the expression of the VEGF and/or VEGFR gene in the subject or organism.

[0151] In one embodiment, the invention features a method for treating or preventing ocular disease in a subject or organism comprising contacting the subject or organism with a siNA molecule of the invention under conditions suitable to modulate (e.g., inhibit) the expression of VEGF and/or VEGFR gene expression in the subject or organism. In one embodiment, the ocular disease is age related macular degeneration (e.g., wet or dry AMD). In one embodiment, the ocular disease is diabetic retinopathy.

[0152] In one embodiment, the invention features a method for treating or preventing cancer in a subject or organism comprising contacting the subject or organism with a siNA molecule of the invention under conditions suitable to modulate (e.g., inhibit) the expression of VEGF and/or VEGFR gene expression in the subject or organism. In one embodiment, the cancer is selected from the group consisting of colorectal cancer, breast cancer, uterine cancer, ovarian cancer, or tumor angiogenesis.

[0153] In one embodiment, the invention features a method for treating or preventing a proliferative disease in a subject or organism comprising contacting the subject or organism with a siNA molecule of the invention under conditions suitable to modulate (e.g., inhibit) the expression of VEGF and/or VEGFR gene expression in the subject or organism.

[0154] In one embodiment, the invention features a method for treating or preventing renal disease in a subject or organism comprising contacting the subject or organism with a siNA molecule of the invention under conditions suitable to modulate (e.g., inhibit) the expression of VEGF and/or VEGFR gene expression in the subject or organism. In one embodiment, the renal disease is polycystic kidney disease.

[0155] In one embodiment, the invention features a method for treating or preventing inflammatory disease in a subject or organism comprising contacting the subject or organism with a siNA molecule of the invention under conditions suitable to modulate (e.g., inhibit) the expression of VEGF and/or VEGFR gene expression in the subject or organism.

[0156] In one embodiment, the invention features a method for treating or preventing respiratory disease in a subject or organism comprising contacting the subject or organism with a siNA molecule of the invention under conditions suitable to modulate (e.g., inhibit) the expression of VEGF and/or VEGFR gene expression in the subject or organism. In one embodiment, the respiratory disease is asthma. In one embodiment, the respiratory disease is chronic obstructive pulmonary disease (COPD).

[0157] In one embodiment, the invention features a method for treating or preventing an allergic disease or condition in a subject or organism comprising contacting the subject or organism with a siNA molecule of the invention under conditions suitable to modulate (e.g., inhibit) the expression of VEGF and/or VEGFR gene expression in the subject or organism. In one embodiment, the allergic disease or condition is allergic rhinitis.

[0158] In one embodiment, the invention features a method for inhibiting or preventing angiogenesis in a subject or organism comprising contacting the subject or organism with a siNA molecule of the invention under conditions suitable to modulate (e.g., inhibit) the expression of VEGF and/or VEGFR gene expression in the subject or organism.

[0159] In another embodiment, the invention features a method of modulating the expression of more than one VEGF and/or VEGFR gene in a subject or organism comprising contacting the subject or organism with one or more siNA molecules of the invention under conditions suitable to modulate (e.g., inhibit) the expression of the VEGF and/or VEGFR genes in the subject or organism.

[0160] The siNA molecules of the invention can be designed to down regulate or inhibit target (e.g., VEGF and/or VEGFR) gene expression through RNAi targeting of a variety of RNA molecules. In one embodiment, the siNA molecules of the invention are used to target various RNAs corresponding to a target gene. Non-limiting examples of such RNAs include messenger RNA (mRNA), alternate RNA splice variants of target gene(s), post-transcriptionally modified RNA of target gene(s), pre-mRNA of target gene(s), and/or RNA templates. If alternate splicing produces a family of transcripts that are distinguished by usage of appropriate exons, the instant invention can be used to inhibit gene expression through the appropriate exons to specifically inhibit or to distinguish among the functions of gene family members. For example, a protein that contains an alternatively spliced transmembrane domain can be expressed in both membrane bound and secreted forms. Use of the invention to target the exon containing the transmembrane domain can be used to determine the functional consequences of pharmaceutical targeting of membrane bound as opposed to the secreted form of the protein. Non-limiting examples of applications of the invention relating to targeting these RNA molecules include therapeutic pharmaceutical applications, pharmaceutical discovery applications, molecular diagnostic and gene function applications, and gene mapping, for example using single nucleotide polymorphism mapping with siNA molecules of the invention. Such applications can be implemented using known gene sequences or from partial sequences available from an expressed sequence tag (EST).

[0161] In another embodiment, the siNA molecules of the invention are used to target conserved sequences corresponding to a gene family or gene families such as VEGF and/or VEGFR family genes. As such, siNA molecules targeting multiple VEGF and/or VEGFR targets can provide increased therapeutic effect. In addition, siNA can be used to characterize pathways of gene function in a variety of applications. For example, the present invention can be used to inhibit the activity of target gene(s) in a pathway to determine the function of uncharacterized gene(s) in gene function analysis, mRNA function analysis, or translational analysis. The invention can be used to determine potential target gene pathways involved in various diseases and conditions toward pharmaceutical development. The invention can be used to understand pathways of gene expression involved in, for example, the progression and/or maintenance of cancer.

[0162] In one embodiment, siNA molecule(s) and/or methods of the invention are used to down regulate the expression of gene(s) that encode RNA referred to by Genbank Accession, for example, VEGF and/or VEGFR genes encoding RNA sequence(s) referred to herein by Genbank Accession number, for example, Genbank Accession Nos. shown in Table I.

[0163] In one embodiment, the invention features a method comprising: (a) generating a library of siNA constructs having a predetermined complexity; and (b) assaying the siNA constructs of (a) above, under conditions suitable to determine RNAi target sites within the target RNA sequence. In one embodiment, the siNA molecules of (a) have strands of a fixed length, for example, about 23 nucleotides in length. In another embodiment, the siNA molecules of (a) are of differing length, for example having strands of about 15 to about 30 (e.g., about 15, 16, 17, 18, 19, 20, 21, 22, 23, 24, 25, 26, 27, 28, 29, or 30) nucleotides in length. In one embodiment, the assay can comprise a reconstituted in vitro siNA assay as described herein. In another embodiment, the assay can comprise a cell culture system in which target RNA is expressed. In another embodiment, fragments of target RNA are analyzed for detectable levels of cleavage, for example by gel electrophoresis, northern blot analysis, or RNAse protection assays, to determine the most suitable target site(s) within the target RNA sequence. The target RNA sequence can be obtained as is known in the art, for example, by cloning and/or transcription for in vitro systems, and by cellular expression in in vivo systems.

[0164] In one embodiment, the invention features a method comprising: (a) generating a randomized library of siNA constructs having a predetermined complexity, such as of 4N, where N represents the number of base paired nucleotides in each of the siNA construct strands (eg. for a siNA construct having 21 nucleotide sense and antisense strands with 19 base pairs, the complexity would be 419); and (b) assaying the siNA constructs of (a) above, under conditions suitable to determine RNAi target sites within the target VEGF and/or VEGFR RNA sequence. In another embodiment, the siNA molecules of (a) have strands of a fixed length, for example about 23 nucleotides in length. In yet another embodiment, the siNA molecules of (a) are of differing length, for example having strands of about 15 to about 30 (e.g., about 15, 16, 17, 18, 19, 20, 21, 22, 23, 24, 25, 26, 27, 28, 29, or 30) nucleotides in length. In one embodiment, the assay can comprise a reconstituted in vitro siNA assay as described in Example 6 herein. In another embodiment, the assay can comprise a cell culture system in which target RNA is expressed. In another embodiment, fragments of VEGF and/or VEGFR RNA are analyzed for detectable levels of cleavage, for example, by gel electrophoresis, northern blot analysis, or RNAse protection assays, to determine the most suitable target site(s) within the target VEGF and/or VEGFR RNA sequence. The target VEGF and/or VEGFR RNA sequence can be obtained as is known in the art, for example, by cloning and/or transcription for in vitro systems, and by cellular expression in in vivo systems.

[0165] In another embodiment, the invention features a method comprising: (a) analyzing the sequence of a RNA target encoded by a target gene; (b) synthesizing one or more sets of siNA molecules having sequence complementary to one or more regions of the RNA of (a); and (c) assaying the siNA molecules of (b) under conditions suitable to determine RNAi targets within the target RNA sequence. In one embodiment, the siNA molecules of (b) have strands of a fixed length, for example about 23 nucleotides in length. In another embodiment, the siNA molecules of (b) are of differing length, for example having strands of about 15 to about 30 (e.g., about 15, 16, 17, 18, 19, 20, 21, 22, 23, 24, 25, 26, 27, 28, 29, or 30) nucleotides in length. In one embodiment, the assay can comprise a reconstituted in vitro siNA assay as described herein. In another embodiment, the assay can comprise a cell culture system in which target RNA is expressed. Fragments of target RNA are analyzed for detectable levels of cleavage, for example by gel electrophoresis, northern blot analysis, or RNAse protection assays, to determine the most suitable target site(s) within the target RNA sequence. The target RNA sequence can be obtained as is known in the art, for example, by cloning and/or transcription for in vitro systems, and by expression in in vivo systems.

[0166] By “target site” is meant a sequence within a target RNA that is “targeted” for cleavage mediated by a siNA construct which contains sequences within its antisense region that are complementary to the target sequence.

[0167] By “detectable level of cleavage” is meant cleavage of target RNA (and formation of cleaved product RNAs) to an extent sufficient to discern cleavage products above the background of RNAs produced by random degradation of the target RNA. Production of cleavage products from 1-5% of the target RNA is sufficient to detect above the background for most methods of detection.

[0168] In one embodiment, the invention features a composition comprising a siNA molecule of the invention, which can be chemically-modified, in a pharmaceutically acceptable carrier or diluent. In another embodiment, the invention features a pharmaceutical composition comprising siNA molecules of the invention, which can be chemically-modified, targeting one or more genes in a pharmaceutically acceptable carrier or diluent. In another embodiment, the invention features a method for diagnosing a disease or condition in a subject comprising administering to the subject a composition of the invention under conditions suitable for the diagnosis of the disease or condition in the subject. In another embodiment, the invention features a method for treating or preventing a disease or condition in a subject, comprising administering to the subject a composition of the invention under conditions suitable for the treatment or prevention of the disease or condition in the subject, alone or in conjunction with one or more other therapeutic compounds. In yet another embodiment, the invention features a method for inhibiting, reducing or preventing ocular disease, cancer, proliferative disease, inflammatory disease, respiratory disease, neurologic disease, allergic disease, angiogenesis, and/or renal disease in a subject or organism comprising administering to the subject a composition of the invention under conditions suitable for inhibiting, reducing or preventing ocular disease, cancer, proliferative disease, inflammatory disease, respiratory disease, neurologic disease, allergic disease, angiogenesis, and/or renal disease in the subject or organism.

[0169] In another embodiment, the invention features a method for validating a VEGF and/or VEGFR gene target, comprising: (a) synthesizing a siNA molecule of the invention, which can be chemically-modified, wherein one of the siNA strands includes a sequence complementary to RNA of a VEGF and/or VEGFR target gene; (b) introducing the siNA molecule into a cell, tissue, subject, or organism under conditions suitable for modulating expression of the VEGF and/or VEGFR target gene in the cell, tissue, subject, or organism; and (c) determining the function of the gene by assaying for any phenotypic change in the cell, tissue, subject, or organism.

[0170] In another embodiment, the invention features a method for validating a VEGF and/or VEGFR target comprising: (a) synthesizing a siNA molecule of the invention, which can be chemically-modified, wherein one of the siNA strands includes a sequence complementary to RNA of a VEGF and/or VEGFR target gene; (b) introducing the siNA molecule into a biological system under conditions suitable for modulating expression of the VEGF and/or VEGFR target gene in the biological system; and (c) determining the function of the gene by assaying for any phenotypic change in the biological system.

[0171] By “biological system” is meant, material, in a purified or unpurified form, from biological sources, including but not limited to human or animal, wherein the system comprises the components required for RNAi activity. The term “biological system” includes, for example, a cell, tissue, subject, or organism, or extract thereof. The term biological system also includes reconstituted RNAi systems that can be used in an in vitro setting.

[0172] By “phenotypic change” is meant any detectable change to a cell that occurs in response to contact or treatment with a nucleic acid molecule of the invention (e.g., siNA). Such detectable changes include, but are not limited to, changes in shape, size, proliferation, motility, protein expression or RNA expression or other physical or chemical changes as can be assayed by methods known in the art. The detectable change can also include expression of reporter genes/molecules such as Green Florescent Protein (GFP) or various tags that are used to identify an expressed protein or any other cellular component that can be assayed.

[0173] In one embodiment, the invention features a kit containing a siNA molecule of the invention, which can be chemically-modified, that can be used to modulate the expression of a VEGF and/or VEGFR target gene in a biological system, including, for example, in a cell, tissue, subject, or organism. In another embodiment, the invention features a kit containing more than one siNA molecule of the invention, which can be chemically-modified, that can be used to modulate the expression of more than one VEGF and/or VEGFR target gene in a biological system, including, for example, in a cell, tissue, subject, or organism.

[0174] In one embodiment, the invention features a cell containing one or more siNA molecules of the invention, which can be chemically-modified. In another embodiment, the cell containing a siNA molecule of the invention is a mammalian cell. In yet another embodiment, the cell containing a siNA molecule of the invention is a human cell.

[0175] In one embodiment, the synthesis of a siNA molecule of the invention, which can be chemically-modified, comprises: (a) synthesis of two complementary strands of the siNA molecule; (b) annealing the two complementary strands together under conditions suitable to obtain a double-stranded siNA molecule. In another embodiment, synthesis of the two complementary strands of the siNA molecule is by solid phase oligonucleotide synthesis. In yet another embodiment, synthesis of the two complementary strands of the siNA molecule is by solid phase tandem oligonucleotide synthesis.

[0176] In one embodiment, the invention features a method for synthesizing a siNA duplex molecule comprising: (a) synthesizing a first oligonucleotide sequence strand of the siNA molecule, wherein the first oligonucleotide sequence strand comprises a cleavable linker molecule that can be used as a scaffold for the synthesis of the second oligonucleotide sequence strand of the siNA; (b) synthesizing the second oligonucleotide sequence strand of siNA on the scaffold of the first oligonucleotide sequence strand, wherein the second oligonucleotide sequence strand further comprises a chemical moiety than can be used to purify the siNA duplex; (c) cleaving the linker molecule of (a) under conditions suitable for the two siNA oligonucleotide strands to hybridize and form a stable duplex; and (d) purifying the siNA duplex utilizing the chemical moiety of the second oligonucleotide sequence strand. In one embodiment, cleavage of the linker molecule in (c) above takes place during deprotection of the oligonucleotide, for example, under hydrolysis conditions using an alkylamine base such as methylamine. In one embodiment, the method of synthesis comprises solid phase synthesis on a solid support such as controlled pore glass (CPG) or polystyrene, wherein the first sequence of (a) is synthesized on a cleavable linker, such as a succinyl linker, using the solid support as a scaffold. The cleavable linker in (a) used as a scaffold for synthesizing the second strand can comprise similar reactivity as the solid support derivatized linker, such that cleavage of the solid support derivatized linker and the cleavable linker of (a) takes place concomitantly. In another embodiment, the chemical moiety of (b) that can be used to isolate the attached oligonucleotide sequence comprises a trityl group, for example a dimethoxytrityl group, which can be employed in a trityl-on synthesis strategy as described herein. In yet another embodiment, the chemical moiety, such as a dimethoxytrityl group, is removed during purification, for example, using acidic conditions.

[0177] In a further embodiment, the method for siNA synthesis is a solution phase synthesis or hybrid phase synthesis wherein both strands of the siNA duplex are synthesized in tandem using a cleavable linker attached to the first sequence which acts a scaffold for synthesis of the second sequence. Cleavage of the linker under conditions suitable for hybridization of the separate siNA sequence strands results in formation of the double-stranded siNA molecule.

[0178] In another embodiment, the invention features a method for synthesizing a siNA duplex molecule comprising: (a) synthesizing one oligonucleotide sequence strand of the siNA molecule, wherein the sequence comprises a cleavable linker molecule that can be used as a scaffold for the synthesis of another oligonucleotide sequence; (b) synthesizing a second oligonucleotide sequence having complementarity to the first sequence strand on the scaffold of (a), wherein the second sequence comprises the other strand of the double-stranded siNA molecule and wherein the second sequence further comprises a chemical moiety than can be used to isolate the attached oligonucleotide sequence; (c) purifying the product of (b) utilizing the chemical moiety of the second oligonucleotide sequence strand under conditions suitable for isolating the full-length sequence comprising both siNA oligonucleotide strands connected by the cleavable linker and under conditions suitable for the two siNA oligonucleotide strands to hybridize and form a stable duplex. In one embodiment, cleavage of the linker molecule in (c) above takes place during deprotection of the oligonucleotide, for example, under hydrolysis conditions. In another embodiment, cleavage of the linker molecule in (c) above takes place after deprotection of the oligonucleotide. In another embodiment, the method of synthesis comprises solid phase synthesis on a solid support such as controlled pore glass (CPG) or polystyrene, wherein the first sequence of (a) is synthesized on a cleavable linker, such as a succinyl linker, using the solid support as a scaffold. The cleavable linker in (a) used as a scaffold for synthesizing the second strand can comprise similar reactivity or differing reactivity as the solid support derivatized linker, such that cleavage of the solid support derivatized linker and the cleavable linker of (a) takes place either concomitantly or sequentially. In one embodiment, the chemical moiety of (b) that can be used to isolate the attached oligonucleotide sequence comprises a trityl group, for example a dimethoxytrityl group.

[0179] In another embodiment, the invention features a method for making a double-stranded siNA molecule in a single synthetic process comprising: (a) synthesizing an oligonucleotide having a first and a second sequence, wherein the first sequence is complementary to the second sequence, and the first oligonucieotide sequence is linked to the second sequence via a cleavable linker, and wherein a terminal 5′-protecting group, for example, a 5′-O-dimethoxytrityl group (5′-O-DMT) remains on the oligonucleotide having the second sequence; (b) deprotecting the oligonucleotide whereby the deprotection results in the cleavage of the linker joining the two oligonucleotide sequences; and (c) purifying the product of (b) under conditions suitable for isolating the double-stranded siNA molecule, for example using a trityl-on synthesis strategy as described herein.

[0180] In another embodiment, the method of synthesis of siNA molecules of the invention comprises the teachings of Scaringe et al., U.S. Pat. Nos. 5,889,136; 6,008,400; and 6,111,086, incorporated by reference herein in their entirety.

[0181] In one embodiment, the invention features siNA constructs that mediate RNAi against VEGF and/or VEGFR, wherein the siNA construct comprises one or more chemical modifications, for example, one or more chemical modifications having any of Formulae I-VII or any combination thereof that increases the nuclease resistance of the siNA construct.

[0182] In another embodiment, the invention features a method for generating siNA molecules with increased nuclease resistance comprising (a) introducing nucleotides having any of Formula I-VII or any combination thereof into a siNA molecule, and (b) assaying the siNA molecule of step (a) under conditions suitable for isolating siNA molecules having increased nuclease resistance.

[0183] In another embodiment, the invention features a method for generating siNA molecules with improved toxicologic profiles (e.g., have attenuated or no immunstimulatory properties) comprising (a) introducing nucleotides having any of Formula I-VII (e.g., siNA motifs referred to in Table IV) or any combination thereof into a siNA molecule, and (b) assaying the siNA molecule of step (a) under conditions suitable for isolating siNA molecules having improved toxicologic profiles.

[0184] In another embodiment, the invention features a method for generating siNA molecules that do not stimulate an interferon response (e.g., no interferon response or attenuated interferon response) in a cell, subject, or organism, comprising (a) introducing nucleotides having any of Formula I-VII (e.g., siNA motifs referred to in Table IV) or any combination thereof into a siNA molecule, and (b) assaying the siNA molecule of step (a) under conditions suitable for isolating siNA molecules that do not stimulate an interferon response.

[0185] By “improved toxicologic profile”, is meant that the chemically modified siNA construct exhibits decreased toxicity in a cell, subject, or organism compared to an unmodified siNA or siNA molecule having fewer modifications or modifications that are less effective in imparting improved toxicology. In a non-limiting example, siNA molecules with improved toxicologic profiles are associated with a decreased or attenuated immunostimulatory response in a cell, subject, or organism compared to an unmodified siNA or siNA molecule having fewer modifications or modifications that are less effective in imparting improved toxicology. In one embodiment, a siNA molecule with an improved toxicological profile comprises no ribonucleotides. In one embodiment, a siNA molecule with an improved toxicological profile comprises less than 5 ribonucleotides (e.g., 1, 2, 3, or 4 ribonucleotides). In one embodiment, a siNA molecule with an improved toxicological profile comprises Stab 7, Stab 8, Stab 11, Stab 12, Stab 13, Stab 16, Stab 17, Stab 18, Stab 19, Stab 20, Stab 23, Stab 24, Stab 25, Stab 26, Stab 27, Stab 28, Stab 29, Stab 30, Stab 31, Stab 32, Stab 33, Stab 34 or any combination thereof (see Table IV). In one embodiment, the level of immunostimulatory response associated with a given siNA molecule can be measured as is known in the art, for example by determining the level of PKR/interferon response, proliferation, B-cell activation, and/or cytokine production in assays to quantitate the immunostimulatory response of particular siNA molecules (see, for example, Leifer et al., 2003, J Immunother. 26, 313-9; and U.S. Pat. No. 5,968,909, incorporated in its entirety by reference).

[0186] In one embodiment, the invention features siNA constructs that mediate RNAi against VEGF and/or VEGFR, wherein the siNA construct comprises one or more chemical modifications described herein that modulates the binding affinity between the sense and antisense strands of the siNA construct.

[0187] In another embodiment, the invention features a method for generating siNA molecules with increased binding affinity between the sense and antisense strands of the siNA molecule comprising (a) introducing nucleotides having any of Formula I-VII or any combination thereof into a siNA molecule, and (b) assaying the siNA molecule of step (a) under conditions suitable for isolating siNA molecules having increased binding affinity between the sense and antisense strands of the siNA molecule.

[0188] In one embodiment, the invention features siNA constructs that mediate RNAi against VEGF and/or VEGFR, wherein the siNA construct comprises one or more chemical modifications described herein that modulates the binding affinity between the antisense strand of the siNA construct and a complementary target RNA sequence within a cell.

[0189] In one embodiment, the invention features siNA constructs that mediate RNAi against VEGF and/or VEGFR, wherein the siNA construct comprises one or more chemical modifications described herein that modulates the binding affinity between the antisense strand of the siNA construct and a complementary target DNA sequence within a cell.

[0190] In another embodiment, the invention features a method for generating siNA molecules with increased binding affinity between the antisense strand of the siNA molecule and a complementary target RNA sequence comprising (a) introducing nucleotides having any of Formula I-VII or any combination thereof into a siNA molecule, and (b) assaying the siNA molecule of step (a) under conditions suitable for isolating siNA molecules having increased binding affinity between the antisense strand of the siNA molecule and a complementary target RNA sequence.

[0191] In another embodiment, the invention features a method for generating siNA molecules with increased binding affinity between the antisense strand of the siNA molecule and a complementary target DNA sequence comprising (a) introducing nucleotides having any of Formula I-VII or any combination thereof into a siNA molecule, and (b) assaying the siNA molecule of step (a) under conditions suitable for isolating siNA molecules having increased binding affinity between the antisense strand of the siNA molecule and a complementary target DNA sequence.

[0192] In one embodiment, the invention features siNA constructs that mediate RNAi against VEGF and/or VEGFR, wherein the siNA construct comprises one or more chemical modifications described herein that modulate the polymerase activity of a cellular polymerase capable of generating additional endogenous siNA molecules having sequence homology to the chemically-modified siNA construct.

[0193] In another embodiment, the invention features a method for generating siNA molecules capable of mediating increased polymerase activity of a cellular polymerase capable of generating additional endogenous siNA molecules having sequence homology to a chemically-modified siNA molecule comprising (a) introducing nucleotides having any of Formula I-VII or any combination thereof into a siNA molecule, and (b) assaying the siNA molecule of step (a) under conditions suitable for isolating siNA molecules capable of mediating increased polymerase activity of a cellular polymerase capable of generating additional endogenous siNA molecules having sequence homology to the chemically-modified siNA molecule.

[0194] In one embodiment, the invention features chemically-modified siNA constructs that mediate RNAi against VEGF and/or VEGFR in a cell, wherein the chemical modifications do not significantly effect the interaction of siNA with a target RNA molecule, DNA molecule and/or proteins or other factors that are essential for RNAi in a manner that would decrease the efficacy of RNAi mediated by such siNA constructs.

[0195] In another embodiment, the invention features a method for generating siNA molecules with improved RNAi activity against VEGF and/or VEGFR comprising (a) introducing nucleotides having any of Formula I-VII or any combination thereof into a siNA molecule, and (b) assaying the siNA molecule of step (a) under conditions suitable for isolating siNA molecules having improved RNAi activity.

[0196] In yet another embodiment, the invention features a method for generating siNA molecules with improved RNAi activity against VEGF and/or VEGFR target RNA comprising (a) introducing nucleotides having any of Formula I-VII or any combination thereof into a siNA molecule, and (b) assaying the siNA molecule of step (a) under conditions suitable for isolating siNA molecules having improved RNAi activity against the target RNA.

[0197] In yet another embodiment, the invention features a method for generating siNA molecules with improved RNAi activity against VEGF and/or VEGFR target DNA comprising (a) introducing nucleotides having any of Formula I-VII or any combination thereof into a siNA molecule, and (b) assaying the siNA molecule of step (a) under conditions suitable for isolating siNA molecules having improved RNAi activity against the target DNA.

[0198] In one embodiment, the invention features siNA constructs that mediate RNAi against VEGF and/or VEGFR, wherein the siNA construct comprises one or more chemical modifications described herein that modulates the cellular uptake of the siNA construct.

[0199] In another embodiment, the invention features a method for generating siNA molecules against VEGF and/or VEGFR with improved cellular uptake comprising (a) introducing nucleotides having any of Formula I-VII or any combination thereof into a siNA molecule, and (b) assaying the siNA molecule of step (a) under conditions suitable for isolating siNA molecules having improved cellular uptake.

[0200] In one embodiment, the invention features siNA constructs that mediate RNAi against VEGF and/or VEGFR, wherein the siNA construct comprises one or more chemical modifications described herein that increases the bioavailability of the siNA construct, for example, by attaching polymeric conjugates such as polyethyleneglycol or equivalent conjugates that improve the pharmacokinetics of the siNA construct, or by attaching conjugates that target specific tissue types or cell types in vivo. Non-limiting examples of such conjugates are described in Vargeese et al., U.S. Ser. No. 10/201,394 incorporated by reference herein.

[0201] In one embodiment, the invention features a method for generating siNA molecules of the invention with improved bioavailability comprising (a) introducing a conjugate into the structure of a siNA molecule, and (b) assaying the siNA molecule of step (a) under conditions suitable for isolating siNA molecules having improved bioavailability. Such conjugates can include ligands for cellular receptors, such as peptides derived from naturally occurring protein ligands; protein localization sequences, including cellular ZIP code sequences; antibodies; nucleic acid aptamers; vitamins and other co-factors, such as folate and N-acetylgalactosamine; polymers, such as polyethyleneglycol (PEG); phospholipids; cholesterol; polyamines, such as spermine or spermidine; and others.

[0202] In one embodiment, the invention features a double stranded short interfering nucleic acid (siNA) molecule that comprises a first nucleotide sequence complementary to a target RNA sequence or a portion thereof, and a second sequence having complementarity to said first sequence, wherein said second sequence is chemically modified in a manner that it can no longer act as a guide sequence for efficiently mediating RNA interference and/or be recognized by cellular proteins that facilitate RNAi. In one embodiment, the first nucleotide sequence of the siNA is chemically modified as described herein. In one embodiment, the first nucleotide sequence of the siNA is not modified (e.g., is all RNA).

[0203] In one embodiment, the invention features a double stranded short interfering nucleic acid (siNA) molecule that comprises a first nucleotide sequence complementary to a target RNA sequence or a portion thereof, and a second sequence having complementarity to said first sequence, wherein the second sequence is designed or modified in a manner that prevents its entry into the RNAi pathway as a guide sequence or as a sequence that is complementary to a target nucleic acid (e.g., RNA) sequence. In one embodiment, the first nucleotide sequence of the siNA is chemically modified as described herein. In one embodiment, the first nucleotide sequence of the siNA is not modified (e.g., is all RNA). Such design or modifications are expected to enhance the activity of siNA and/or improve the specificity of siNA molecules of the invention. These modifications are also expected to minimize any off-target effects and/or associated toxicity.

[0204] In one embodiment, the invention features a double stranded short interfering nucleic acid (siNA) molecule that comprises a first nucleotide sequence complementary to a target RNA sequence or a portion thereof, and a second sequence having complementarity to said first sequence, wherein said second sequence is incapable of acting as a guide sequence for mediating RNA interference. In one embodiment, the first nucleotide sequence of the siNA is chemically modified as described herein. In one embodiment, the first nucleotide sequence of the siNA is not modified (e.g., is all RNA).

[0205] In one embodiment, the invention features a double stranded short interfering nucleic acid (siNA) molecule that comprises a first nucleotide sequence complementary to a target RNA sequence or a portion thereof, and a second sequence having complementarity to said first sequence, wherein said second sequence does not have a terminal 5′-hydroxyl (5′-OH) or 5′-phosphate group.

[0206] In one embodiment, the invention features a double stranded short interfering nucleic acid (siNA) molecule that comprises a first nucleotide sequence complementary to a target RNA sequence or a portion thereof, and a second sequence having complementarity to said first sequence, wherein said second sequence comprises a terminal cap moiety at the 5′-end of said second sequence. In one embodiment, the terminal cap moiety comprises an inverted abasic, inverted deoxy abasic, inverted nucleotide moiety, a group shown in FIG. 10, an alkyl or cycloalkyl group, a heterocycle, or any other group that prevents RNAi activity in which the second sequence serves as a guide sequence or template for RNAi.

[0207] In one embodiment, the invention features a double stranded short interfering nucleic acid (siNA) molecule that comprises a first nucleotide sequence complementary to a target RNA sequence or a portion thereof, and a second sequence having complementarity to said first sequence, wherein said second sequence comprises a terminal cap moiety at the 5′-end and 3′-end of said second sequence. In one embodiment, each terminal cap moiety individually comprises an inverted abasic, inverted deoxy abasic, inverted nucleotide moiety, a group shown in FIG. 10, an alkyl or cycloalkyl group, a heterocycle, or any other group that prevents RNAi activity in which the second sequence serves as a guide sequence or template for RNAi.

[0208] In one embodiment, the invention features a method for generating siNA molecules of the invention with improved specificity for down regulating or inhibiting the expression of a target nucleic acid (e.g., a DNA or RNA such as a gene or its corresponding RNA), comprising (a) introducing one or more chemical modifications into the structure of a siNA molecule, and (b) assaying the siNA molecule of step (a) under conditions suitable for isolating siNA molecules having improved specificity. In another embodiment, the chemical modification used to improve specificity comprises terminal cap modifications at the 5′-end, 3′-end, or both 5′ and 3′-ends of the siNA molecule. The terminal cap modifications can comprise, for example, structures shown in FIG. 10 (e.g. inverted deoxyabasic moieties) or any other chemical modification that renders a portion of the siNA molecule (e.g. the sense strand) incapable of mediating RNA interference against an off target nucleic acid sequence. In a non-limiting example, a siNA molecule is designed such that only the antisense sequence of the siNA molecule can serve as a guide sequence for RISC mediated degradation of a corresponding target RNA sequence. This can be accomplished by rendering the sense sequence of the siNA inactive by introducing chemical modifications to the sense strand that preclude recognition of the sense strand as a guide sequence by RNAi machinery. In one embodiment, such chemical modifications comprise any chemical group at the 5′-end of the sense strand of the siNA, or any other group that serves to render the sense strand inactive as a guide sequence for mediating RNA interference. These modifications, for example, can result in a molecule where the 5′-end of the sense strand no longer has a free 5′-hydroxyl (5′-OH) or a free 5′-phosphate group (e.g., phosphate, diphosphate, triphosphate, cyclic phosphate etc.). Non-limiting examples of such siNA constructs are described herein, such as “Stab 9/10”, “Stab 7/8”, “Stab 7/19”, “Stab 17/22”, “Stab 23/24”, “Stab 24/25”, and “Stab 24/26” (e.g., any siNA having Stab 7, 9, 17, 23, or 24 sense strands) chemistries and variants thereof (see Table IV) wherein the 5′-end and 3′-end of the sense strand of the siNA do not comprise a hydroxyl group or phosphate group.

[0209] In one embodiment, the invention features a method for generating siNA molecules of the invention with improved specificity for down regulating or inhibiting the expression of a target nucleic acid (e.g., a DNA or RNA such as a gene or its corresponding RNA), comprising introducing one or more chemical modifications into the structure of a siNA molecule that prevent a strand or portion of the siNA molecule from acting as a template or guide sequence for RNAi activity. In one embodiment, the inactive strand or sense region of the siNA molecule is the sense strand or sense region of the siNA molecule, i.e. the strand or region of the siNA that does not have complementarity to the target nucleic acid sequence. In one embodiment, such chemical modifications comprise any chemical group at the 5′-end of the sense strand or region of the siNA that does not comprise a 5′-hydroxyl (5′-OH) or 5′-phosphate group, or any other group that serves to render the sense strand or sense region inactive as a guide sequence for mediating RNA interference. Non-limiting examples of such siNA constructs are described herein, such as “Stab 9/10”, “Stab 7/8”, “Stab 7/19”, “Stab 17/22”, “Stab 23/24”, “Stab 24/25”, and “Stab 24/26” (e.g., any siNA having Stab 7, 9, 17, 23, or 24 sense strands) chemistries and variants thereof (see Table IV) wherein the 5′-end and 3′-end of the sense strand of the siNA do not comprise a hydroxyl group or phosphate group.

[0210] In one embodiment, the invention features a method for screening siNA molecules that are active in mediating RNA interference against a target nucleic acid sequence comprising (a) generating a plurality of unmodified siNA molecules, (b) screening the siNA molecules of step (a) under conditions suitable for isolating siNA molecules that are active in mediating RNA interference against the target nucleic acid sequence, and (c) introducing chemical modifications (e.g. chemical modifications as described herein or as otherwise known in the art) into the active siNA molecules of (b). In one embodiment, the method further comprises re-screening the chemically modified siNA molecules of step (c) under conditions suitable for isolating chemically modified siNA molecules that are active in mediating RNA interference against the target nucleic acid sequence.

[0211] In one embodiment, the invention features a method for screening chemically modified siNA molecules that are active in mediating RNA interference against a target nucleic acid sequence comprising (a) generating a plurality of chemically modified siNA molecules (e.g. siNA molecules as described herein or as otherwise known in the art), and (b) screening the siNA molecules of step (a) under conditions suitable for isolating chemically modified siNA molecules that are active in mediating RNA interference against the target nucleic acid sequence.

[0212] The term “ligand” refers to any compound or molecule, such as a drug, peptide, hormone, or neurotransmitter, that is capable of interacting with another compound, such as a receptor, either directly or indirectly. The receptor that interacts with a ligand can be present on the surface of a cell or can alternately be an intercellular receptor. Interaction of the ligand with the receptor can result in a biochemical reaction, or can simply be a physical interaction or association.

[0213] In another embodiment, the invention features a method for generating siNA molecules of the invention with improved bioavailability comprising (a) introducing an excipient formulation to a siNA molecule, and (b) assaying the siNA molecule of step (a) under conditions suitable for isolating siNA molecules having improved bioavailability. Such excipients include polymers such as cyclodextrins, lipids, cationic lipids, polyamines, phospholipids, nanoparticles, receptors, ligands, and others.

[0214] In another embodiment, the invention features a method for generating siNA molecules of the invention with improved bioavailability comprising (a) introducing nucleotides having any of Formulae I-VII or any combination thereof into a siNA molecule, and (b) assaying the siNA molecule of step (a) under conditions suitable for isolating siNA molecules having improved bioavailability.

[0215] In another embodiment, polyethylene glycol (PEG) can be covalently attached to siNA compounds of the present invention. The attached PEG can be any molecular weight, preferably from about 100 to about 50,000 daltons (Da).

[0216] The present invention can be used alone or as a component of a kit having at least one of the reagents necessary to carry out the in vitro or in vivo introduction of RNA to test samples and/or subjects. For example, preferred components of the kit include a siNA molecule of the invention and a vehicle that promotes introduction of the siNA into cells of interest as described herein (e.g., using lipids and other methods of transfection known in the art, see for example Beigelman et al, U.S. Pat. No. 6,395,713). The kit can be used for target validation, such as in determining gene function and/or activity, or in drug optimization, and in drug discovery (see for example Usman et al., U.S. Ser. No. 60/402,996). Such a kit can also include instructions to allow a user of the kit to practice the invention.

[0217] The term “short interfering nucleic acid”, “siNA”, “short interfering RNA”, “siRNA”, “short interfering nucleic acid molecule”, “short interfering oligonucleotide molecule”, or “chemically-modified short interfering nucleic acid molecule” as used herein refers to any nucleic acid molecule capable of inhibiting or down regulating gene expression or viral replication, for example by mediating RNA interference “RNAi” or gene silencing in a sequence-specific manner; see for example Zamore et al., 2000, Cell, 101, 25-33; Bass, 2001, Nature, 411, 428-429; Elbashir et al., 2001, Nature, 411, 494-498; and Kreutzer et al., International PCT Publication No. WO 00/44895; Zernicka-Goetz et al., International PCT Publication No. WO 01/36646; Fire, International PCT Publication No. WO 99/32619; Plaetinck et al., International PCT Publication No. WO 00/01846; Mello and Fire, International PCT Publication No. WO 01/29058; Deschamps-Depaillette, International PCT Publication No. WO 99/07409; and Li et al., International PCT Publication No. WO 00/44914; Allshire, 2002, Science, 297, 1818-1819; Volpe et al., 2002, Science, 297, 1833-1837; Jenuwein, 2002, Science, 297, 2215-2218; and Hall et al., 2002, Science, 297, 2232-2237; Hutvagner and Zamore, 2002, Science, 297, 2056-60; McManus et al., 2002, RNA, 8, 842-850; Reinhart et al., 2002, Gene & Dev., 16, 1616-1626; and Reinhart & Bartel, 2002, Science, 297, 1831). Non limiting examples of siNA molecules of the invention are shown in FIGS. 4-6, and Tables II and III herein. For example the siNA can be a double-stranded polynucleotide molecule comprising self-complementary sense and antisense regions, wherein the antisense region comprises nucleotide sequence that is complementary to nucleotide sequence in a target nucleic acid molecule or a portion thereof and the sense region having nucleotide sequence corresponding to the target nucleic acid sequence or a portion thereof. The siNA can be assembled from two separate oligonucleotides, where one strand is the sense strand and the other is the antisense strand, wherein the antisense and sense strands are self-complementary (i.e. each strand comprises nucleotide sequence that is complementary to nucleotide sequence in the other strand; such as where the antisense strand and sense strand form a duplex or double stranded structure, for example wherein the double stranded region is about 15 to about 30, e.g., about 15, 16, 17, 18, 19, 20, 21, 22, 23, 24, 25, 26, 27, 28, 29 or 30 base pairs; the antisense strand comprises nucleotide sequence that is complementary to nucleotide sequence in a target nucleic acid molecule or a portion thereof and the sense strand comprises nucleotide sequence corresponding to the target nucleic acid sequence or a portion thereof (e.g., about 15 to about 25 or more nucleotides of the siNA molecule are complementary to the target nucleic acid or a portion thereof). Alternatively, the siNA is assembled from a single oligonucleotide, where the self-complementary sense and antisense regions of the siNA are linked by means of a nucleic acid based or non-nucleic acid-based linker(s). The siNA can be a polynucleotide with a duplex, asymmetric duplex, hairpin or asymmetric hairpin secondary structure, having self-complementary sense and antisense regions, wherein the antisense region comprises nucleotide sequence that is complementary to nucleotide sequence in a separate target nucleic acid molecule or a portion thereof and the sense region having nucleotide sequence corresponding to the target nucleic acid sequence or a portion thereof. The siNA can be a circular single-stranded polynucleotide having two or more loop structures and a stem comprising self-complementary sense and antisense regions, wherein the antisense region comprises nucleotide sequence that is complementary to nucleotide sequence in a target nucleic acid molecule or a portion thereof and the sense region having nucleotide sequence corresponding to the target nucleic acid sequence or a portion thereof, and wherein the circular polynucleotide can be processed either in vivo or in vitro to generate an active siNA molecule capable of mediating RNAi. The siNA can also comprise a single stranded polynucleotide having nucleotide sequence complementary to nucleotide sequence in a target nucleic acid molecule or a portion thereof (for example, where such siNA molecule does not require the presence within the siNA molecule of nucleotide sequence corresponding to the target nucleic acid sequence or a portion thereof), wherein the single stranded polynucleotide can further comprise a terminal phosphate group, such as a 5′-phosphate (see for example Martinez et al., 2002, Cell., 110, 563-574 and Schwarz et al., 2002, Molecular Cell, 10, 537-568), or 5′,3′-diphosphate. In certain embodiments, the siNA molecule of the invention comprises separate sense and antisense sequences or regions, wherein the sense and antisense regions are covalently linked by nucleotide or non-nucleotide linkers molecules as is known in the art, or are alternately non-covalently linked by ionic interactions, hydrogen bonding, van der waals interactions, hydrophobic interactions, and/or stacking interactions. In certain embodiments, the siNA molecules of the invention comprise nucleotide sequence that is complementary to nucleotide sequence of a target gene. In another embodiment, the siNA molecule of the invention interacts with nucleotide sequence of a target gene in a manner that causes inhibition of expression of the target gene. As used herein, siNA molecules need not be limited to those molecules containing only RNA, but further encompasses chemically-modified nucleotides and non-nucleotides. In certain embodiments, the short interfering nucleic acid molecules of the invention lack 2′-hydroxy (2′-OH) containing nucleotides. Applicant describes in certain embodiments short interfering nucleic acids that do not require the presence of nucleotides having a 2′-hydroxy group for mediating RNAi and as such, short interfering nucleic acid molecules of the invention optionally do not include any ribonucleotides (e.g., nucleotides having a 2′-OH group). Such siNA molecules that do not require the presence of ribonucleotides within the siNA molecule to support RNAi can however have an attached linker or linkers or other attached or associated groups, moieties, or chains containing one or more nucleotides with 2′-OH groups. Optionally, siNA molecules can comprise ribonucleotides at about 5, 10, 20, 30, 40, or 50% of the nucleotide positions. The modified short interfering nucleic acid molecules of the invention can also be referred to as short interfering modified oligonucleotides “siMON.” As used herein, the term siNA is meant to be equivalent to other terms used to describe nucleic acid molecules that are capable of mediating sequence specific RNAi, for example short interfering RNA (siRNA), double-stranded RNA (dsRNA), micro-RNA (miRNA), short hairpin RNA (shRNA), short interfering oligonucleotide, short interfering nucleic acid, short interfering modified oligonucleotide, chemically-modified siRNA, post-transcriptional gene silencing RNA (ptgsRNA), and others. In addition, as used herein, the term RNAi is meant to be equivalent to other terms used to describe sequence specific RNA interference, such as post transcriptional gene silencing, translational inhibition, or epigenetics. For example, siNA molecules of the invention can be used to epigenetically silence genes at both the post-transcriptional level or the pre-transcriptional level. In a non-limiting example, epigenetic regulation of gene expression by siNA molecules of the invention can result from siNA mediated modification of chromatin structure or methylation pattern to alter gene expression (see, for example, Verdel et al., 2004, Science, 303, 672-676; Pal-Bhadra et al., 2004, Science, 303, 669-672; Allshire, 2002, Science, 297, 1818-1819; Volpe et al., 2002, Science, 297, 1833-1837; Jenuwein, 2002, Science, 297, 2215-2218; and Hall et al., 2002, Science, 297, 2232-2237).

[0218] In one embodiment, a siNA molecule of the invention is a duplex forming oligonucleotide “DFO”, (see for example FIGS. 14-15 and Vaish et al., U.S. Ser. No. 10/727,780 filed Dec. 3, 2003 and International PCT Application No. US04/16390, filed May 24, 2004).

[0219] In one embodiment, a siNA molecule of the invention is a multifunctional siNA, (see for example FIGS. 16-21 and Jadhav et al., U.S. Ser. No. 60/543,480 filed Feb. 10, 2004 and International PCT Application No. US04/16390, filed May 24, 2004). In one embodiment, the multifunctional siNA of the invention can comprise sequence targeting, for example, two or more regions of VEGF and/or VEGFR RNA (see for example target sequences in Tables II and III). In one embodiment, the multifunctional siNA of the invention can comprise sequence targeting one or more VEGF isoforms (e.g., VEGF-A, VEGF-B, VEGF-C, and/or VEGF-D). In one embodiment, the multifunctional siNA of the invention can comprise sequence targeting one or more VEGF receptors (e.g., VEGFR1, VEGFR2, and/or VEGFR3). In one embodiment, the multifunctional siNA of the invention can comprise sequence targeting one or more VEGF isoforms (e.g., VEGF-A, VEGF-B, VEGF-C, and/or VEGF-D) and one or more VEGF receptors, (e.g., VEGFR1, VEGFR2, and/or VEGFR3). In one embodiment, the multifunctional siNA of the invention can comprise sequence targeting one or more VEGF isoforms (e.g., VEGF-A, VEGF-B, VEGF-C, and/or VEGF-D) and one or more interleukins (e.g., IL-4 or IL-13) or one or more interleukin receptors (e.g., IL-4R or IL-13R). In one embodiment, the multifunctional siNA of the invention can comprise sequence targeting one or more VEGF receptors (e.g., VEGFR1, VEGFR2, and/or VEGFR3) and one or more interleukins (e.g., IL-4 or IL-13) or one or more interleukin receptors (e.g., IL-4R or IL-13R). In one embodiment, the multifunctional siNA of the invention can comprise sequence targeting one or more VEGF isoforms (e.g., VEGF-A, VEGF-B, VEGF-C, and/or VEGF-D), one or more VEGF receptors (e.g., VEGFR1, VEGFR2, and/or VEGFR3) and one or more interleukins (e.g., IL-4 or IL-13) or one or more interleukin receptors (e.g., IL-4R or IL-13R).

[0220] By “asymmetric hairpin” as used herein is meant a linear siNA molecule comprising an antisense region, a loop portion that can comprise nucleotides or non-nucleotides, and a sense region that comprises fewer nucleotides than the antisense region to the extent that the sense region has enough complementary nucleotides to base pair with the antisense region and form a duplex with loop. For example, an asymmetric hairpin siNA molecule of the invention can comprise an antisense region having length sufficient to mediate RNAi in a cell or in vitro system (e.g. about 15 to about 30, or about 15, 16, 17, 18, 19, 20, 21, 22, 23, 24, 25, 26, 27, 28, 29, or 30 nucleotides) and a loop region comprising about 4 to about 12 (e.g., about 4, 5, 6, 7, 8, 9, 10, 11, or 12) nucleotides, and a sense region having about 3 to about 25 (e.g., about 3, 4, 5, 6, 7, 8, 9, 10, 11, 12, 13, 14, 15, 16, 17, 18, 19, 20, 21, 22, 23, 24, or 25) nucleotides that are complementary to the antisense region. The asymmetric hairpin siNA molecule can also comprise a 5′-terminal phosphate group that can be chemically modified. The loop portion of the asymmetric hairpin siNA molecule can comprise nucleotides, non-nucleotides, linker molecules, or conjugate molecules as described herein.

[0221] By “asymmetric duplex” as used herein is meant a siNA molecule having two separate strands comprising a sense region and an antisense region, wherein the sense region comprises fewer nucleotides than the antisense region to the extent that the sense region has enough complementary nucleotides to base pair with the antisense region and form a duplex. For example, an asymmetric duplex siNA molecule of the invention can comprise an antisense region having length sufficient to mediate RNAi in a cell or in vitro system (e.g. about 15 to about 30, or about 15, 16, 17, 18, 19, 20, 21, 22, 23, 24, 25, 26, 27, 28, 29, or 30 nucleotides) and a sense region having about 3 to about 25 (e.g., about 3, 4, 5, 6, 7, 8, 9, 10, 11, 12, 13, 14, 15, 16, 17, 18, 19, 20, 21, 22, 23, 24, or 25) nucleotides that are complementary to the antisense region.

[0222] By “modulate” is meant that the expression of the gene, or level of RNA molecule or equivalent RNA molecules encoding one or more proteins or protein subunits, or activity of one or more proteins or protein subunits is up regulated or down regulated, such that expression, level, or activity is greater than or less than that observed in the absence of the modulator. For example, the term “modulate” can mean “inhibit,” but the use of the word “modulate” is not limited to this definition.

[0223] By “inhibit”, “down-regulate”, or “reduce”, it is meant that the expression of the gene, or level of RNA molecules or equivalent RNA molecules encoding one or more proteins or protein subunits, or activity of one or more proteins or protein subunits, is reduced below that observed in the absence of the nucleic acid molecules (e.g., siNA) of the invention. In one embodiment, inhibition, down-regulation or reduction with an siNA molecule is below that level observed in the presence of an inactive or attenuated molecule. In another embodiment, inhibition, down-regulation, or reduction with siNA molecules is below that level observed in the presence of, for example, an siNA molecule with scrambled sequence or with mismatches. In another embodiment, inhibition, down-regulation, or reduction of gene expression with a nucleic acid molecule of the instant invention is greater in the presence of the nucleic acid molecule than in its absence. In one embodiment, inhibition, down regulation, or reduction of gene expression is associated with post transcriptional silencing, such as RNAi mediated cleavage of a target nucleic acid molecule (e.g. RNA) or inhibition of translation. In one embodiment, inhibition, down regulation, or reduction of gene expression is associated with pretranscriptional silencing.

[0224] By “gene”, or “target gene”, is meant a nucleic acid that encodes an RNA, for example, nucleic acid sequences including, but not limited to, structural genes encoding a polypeptide. A gene or target gene can also encode a functional RNA (FRNA) or non-coding RNA (ncRNA), such as small temporal RNA (stRNA), micro RNA (miRNA), small nuclear RNA (snRNA), short interfering RNA (siRNA), small nucleolar RNA (snRNA), ribosomal RNA (rRNA), transfer RNA (tRNA) and precursor RNAs thereof. Such non-coding RNAs can serve as target nucleic acid molecules for siNA mediated RNA interference in modulating the activity of fRNA or ncRNA involved in functional or regulatory cellular processes. Abberant fRNA or ncRNA activity leading to disease can therefore be modulated by siNA molecules of the invention. siNA molecules targeting fRNA and ncRNA can also be used to manipulate or alter the genotype or phenotype of a subject, organism or cell, by intervening in cellular processes such as genetic imprinting, transcription, translation, or nucleic acid processing (e.g., transamination, methylation etc.). The target gene can be a gene derived from a cell, an endogenous gene, a transgene, or exogenous genes such as genes of a pathogen, for example a virus, which is present in the cell after infection thereof. The cell containing the target gene can be derived from or contained in any organism, for example a plant, animal, protozoan, virus, bacterium, or fungus. Non-limiting examples of plants include monocots, dicots, or gymnosperms. Non-limiting examples of animals include vertebrates or invertebrates. Non-limiting examples of fungi include molds or yeasts. For a review, see for example Snyder and Gerstein, 2003, Science, 300, 258-260.

[0225] By “non-canonical base pair” is meant any non-Watson Crick base pair, such as mismatches and/or wobble base pairs, including flipped mismatches, single hydrogen bond mismatches, trans-type mismatches, triple base interactions, and quadruple base interactions. Non-limiting examples of such non-canonical base pairs include, but are not limited to, AC reverse Hoogsteen, AC wobble, AU reverse Hoogsteen, GU wobble, AA N7 amino, CC 2-carbonyl-amino(H1)-N-3-amino(H2), GA sheared, UC 4-carbonyl-amino, UU imino-carbonyl, AC reverse wobble, AU Hoogsteen, AU reverse Watson Crick, CG reverse Watson Crick, GC N3-amino-amino N3, AA N1-amino symmetric, AA N7-amino symmetric, GA N7-N1 amino-carbonyl, GA+carbonyl-amino N7-N1, GG N1-carbonyl symmetric, GG N3-amino symmetric, CC carbonyl-amino symmetric, CC N3-amino symmetric, UU 2-carbonyl-imino symmetric, UU 4-carbonyl-imino symmetric, AA amino-N3, AA N1-amino, AC amino 2-carbonyl, AC N3-amino, AC N7-amino, AU amino-4-carbonyl, AU N1-imino, AU N3-imino, AU N7-imino, CC carbonyl-amino, GA amino-N1, GA amino-N7, GA carbonyl-amino, GA N3-amino, GC amino-N3, GC carbonyl-amino, GC N3-amino, GC N7-amino, GG amino-N7, GG carbonyl-imino, GG N7-amino, GU amino-2-carbonyl, GU carbonyl-imino, GU imino-2-carbonyl, GU N7-imino, psiU imino-2-carbonyl, UC 4-carbonyl-amino, UC imino-carbonyl, UU imino-4-carbonyl, AC C2-H—N3, GA carbonyl-C2-H, UU imino-4-carbonyl 2 carbonyl-C5-H, AC amino(A) N3(C)-carbonyl, GC imino amino-carbonyl, Gpsi imino-2-carbonyl amino-2-carbonyl, and GU imino amino-2-carbonyl base pairs.

[0226] By “VEGF” as used herein is meant, any vascular endothelial growth factor (e.g., VEGF, VEGF-A, VEGF-B, VEGF-C, VEGF-D) protein, peptide, or polypeptide having vascular endothelial growth factor activity, such as encoded by VEGF Genbank Accession Nos. shown in Table I. The term VEGF also refers to nucleic acid sequences encloding any vascular endothelial growth factor protein, peptide, or polypeptide having vascular endothelial growth factor activity.

[0227] By “VEGF-B” is meant, protein, peptide, or polypeptide receptor or a derivative thereof, such as encoded by Genbank Accession No. NM_{—}003377, having vascular endothelial growth factor type B activity. The term VEGF-B also refers to nucleic acid sequences encloding any VEGF-B protein, peptide, or polypeptide having VEGF-B activity.

[0228] By “VEGF-C” is meant, protein, peptide, or polypeptide receptor or a derivative thereof, such as encoded by Genbank Accession No. NM_{—}005429, having vascular endothelial growth factor type C activity. The term VEGF-C also refers to nucleic acid sequences encloding any VEGF-C protein, peptide, or polypeptide having VEGF-C activity.

[0229] By “VEGF-D” is meant, protein, peptide, or polypeptide receptor or a derivative thereof, such as encoded by Genbank Accession No. NM_{—}004469, having vascular endothelial growth factor type D activity. The term VEGF-D also refers to nucleic acid sequences encloding any VEGF-D protein, peptide, or polypeptide having VEGF-D activity.

[0230] By “VEGFR” as used herein is meant, any vascular endothelial growth factor receptor protein, peptide, or polypeptide (e.g., VEGFR1, VEGFR2, or VEGFR3, including both membrane bound and/or soluble forms thereof) having vascular endothelial growth factor receptor activity, such as encoded by VEGFR Genbank Accession Nos. shown in Table I. The term VEGFR also refers to nucleic acid sequences encloding any vascular endothelial growth factor receptor protein, peptide, or polypeptide having vascular endothelial growth factor receptor activity.

[0231] By “VEGFR1” is meant, protein, peptide, or polypeptide receptor or a derivative thereof, such as encoded by Genbank Accession No. NM_{—}002019, having vascular endothelial growth factor receptor type 1 (flt) activity, for example, having the ability to bind a vascular endothelial growth factor. The term VEGF1 also refers to nucleic acid sequences encloding any VEGFR1 protein, peptide, or polypeptide having VEGFR1 activity.

[0232] By “VEGFR2” is meant, protein, peptide, or polypeptide receptor or a derivative thereof, such as encoded by Genbank Accession No. NM_{—}002253, having vascular endothelial growth factor receptor type 2 (kdr) activity, for example, having the ability to bind a vascular endothelial growth factor. The term VEGF2 also refers to nucleic acid sequences encloding any VEGFR2 protein, peptide, or polypeptide having VEGFR2 activity.

[0233] By “VEGFR3” is meant, protein, peptide, or polypeptide receptor or a derivative thereof, such as encoded by Genbank Accession No. NM_{—}002020 having vascular endothelial growth factor receptor type 3 (kdr) activity, for example, having the ability to bind a vascular endothelial growth factor. The term VEGFR3 also refers to nucleic acid sequences encloding any VEGFR3 protein, peptide, or polypeptide having VEGFR3 activity.

[0234] By “interleukin” is meant, any interleukin (e.g., IL-1, IL-2, IL-3, IL-4, IL-5, IL-6, IL-7, IL-8, IL-9, IL-10, IL-11, IL-12, IL-13, IL-14, IL-15, IL-16, IL-17, IL-18, IL-19, IL-20, IL-21, IL-22, IL-23, IL-24, IL-25, IL-26, and IL-27) protein, peptide, or polypeptide having any interleukin activity, such as encoded by interleukin Genbank Accession Nos. described in U.S. Ser. No. 10/922,675, filed Aug. 20, 2004 and incorporated by reference herein in its entirety including the drawings. The term interleukin also refers to nucleic acid sequences encoding any interleukin protein, peptide, or polypeptide having interleukin activity. The term “interleukin” is also meant to include other interleukin encoding sequence, such as other interleukin isoforms, mutant interleukin genes, splice variants of interleukin genes, and interleukin gene polymorphisms.

[0235] By “interleukin receptor” is meant, any interleukin receptor (e.g., IL-1R, IL-2R, IL-3R, IL-4R, IL-5R, IL-6R, IL-7R, IL-8R, IL-9R, IL-1R, IL-11R, IL-12R, IL-13R, IL-14R, IL-15R, IL-16R, IL-17R, IL-18R, IL-19R, IL-20R, IL-21 R, IL-22R, IL-23R, IL-24R, IL-25R, IL-26R, and IL-27R) protein, peptide, or polypeptide having any interleukin receptor activity, such as encoded by interleukin receptor Genbank Accession Nos. described in U.S. Ser. No. 10/922,675, filed Aug. 20, 2004 and incorporated by reference herein in its entirety including the drawings. The term interleukin receptor also refers to nucleic acid sequences encoding any interleukin receptor protein, peptide, or polypeptide having interleukin receptor activity. The term “interleukin receptor” is also meant to include other interleukin receptor encoding sequence, such as other interleukin receptor isoforms, mutant interleukin receptor genes, splice variants of interleukin receptor genes, and interleukin receptor gene polymorphisms.

[0236] By “homologous sequence” is meant, a nucleotide sequence that is shared by one or more polynucleotide sequences, such as genes, gene transcripts and/or non-coding polynucleotides. For example, a homologous sequence can be a nucleotide sequence that is shared by two or more genes encoding related but different proteins, such as different members of a gene family, different protein epitopes, different protein isoforms or completely divergent genes, such as a cytokine and its corresponding receptors. A homologous sequence can be a nucleotide sequence that is shared by two or more non-coding polynucleotides, such as noncoding DNA or RNA, regulatory sequences, introns, and sites of transcriptional control or regulation. Homologous sequences can also include conserved sequence regions shared by more than one polynucleotide sequence. Homology does not need to be perfect homology (e.g., 100%), as partially homologous sequences are also contemplated by the instant invention (e.g., 99%, 98%, 97%, 96%, 95%, 94%, 93%, 92%, 91%, 90%, 89%, 88%, 87%, 86%, 85%, 84%, 83%, 82%, 81%, 80% etc.).

[0237] By “conserved sequence region” is meant, a nucleotide sequence of one or more regions in a polynucleotide does not vary significantly between generations or from one biological system, subject, or organism to another biological system, subject, or organism. The polynucleotide can include both coding and non-coding DNA and RNA.

[0238] By “sense region”. is meant a nucleotide sequence of a siNA molecule having complementarity to an antisense region of the siNA molecule. In addition, the sense region of a siNA molecule can comprise a nucleic acid sequence having homology with a target nucleic acid sequence.

[0239] By “antisense region” is meant a nucleotide sequence of a siNA molecule having complementarity to a target nucleic acid sequence. In addition, the antisense region of a siNA molecule can optionally comprise a nucleic acid sequence having complementarity to a sense region of the siNA molecule.

[0240] By “target nucleic acid” is meant any nucleic acid sequence whose expression or activity is to be modulated. The target nucleic acid can be DNA or RNA. In one embodiment, a target nucleic acid of the invention is VEGF RNA or DNA. In another embodiment, a target nucleic acid of the invention is a VEGFR RNA or DNA.

[0241] By “complementarity” is meant that a nucleic acid can form hydrogen bond(s) with another nucleic acid sequence by either traditional Watson-Crick or other non-traditional types. In reference to the nucleic molecules of the present invention, the binding free energy for a nucleic acid molecule with its complementary sequence is sufficient to allow the relevant function of the nucleic acid to proceed, e.g., RNAi activity. Determination of binding free energies for nucleic acid molecules is well known in the art (see, e.g., Turner et al., 1987, CSH Symp. Quant. Biol. LII pp. 123-133; Frier et al., 1986, Proc. Nat. Acad. Sci. USA 83:9373-9377; Turner et al., 1987, J. Am. Chem. Soc. 109:3783-3785). A percent complementarity indicates the percentage of contiguous residues in a nucleic acid molecule that can form hydrogen bonds (e.g., Watson-Crick base pairing) with a second nucleic acid sequence (e.g., 5, 6, 7, 8, 9, or 10 nucleotides out of a total of 10 nucleotides in the first oligonucleotide being based paired to a second nucleic acid sequence having 10 nucleotides represents 50%, 60%, 70%, 80%, 90%, and 100% complementary respectively). “Perfectly complementary” means that all the contiguous residues of a nucleic acid sequence will hydrogen bond with the same number of contiguous residues in a second nucleic acid sequence. In one embodiment, a siNA molecule of the invention comprises about 15 to about 30 or more (e.g., about 15, 16, 17, 18, 19, 20, 21, 22, 23, 24, 25, 26, 27, 28, 29, or 30 or more) nucleotides that are complementary to one or more target nucleic acid molecules or a portion thereof.

[0242] In one embodiment, siNA molecules of the invention that down regulate or reduce VEGF and/or VEGFR gene expression are used for treating, preventing or reducing ocular disease, cancer, proliferative disease, inflammatory disease, respiratory disease, neurologic disease, allergic disease, renal disease, or angiogenesis in a subject or organism.

[0243] By “proliferative disease” or “cancer” as used herein is meant, any disease, condition, trait, genotype or phenotype characterized by unregulated cell growth or replication as is known in the art; including AIDS related cancers such as Kaposi's sarcoma; breast cancers; bone cancers such as Osteosarcoma, Chondrosarcomas, Ewing's sarcoma, Fibrosarcomas, Giant cell tumors, Adamantinomas, and Chordomas; Brain cancers such as Meningiomas, Glioblastomas, Lower-Grade Astrocytomas, Oligodendrocytomas, Pituitary Tumors, Schwannomas, and Metastatic brain cancers; cancers of the head and neck including various lymphomas such as mantle cell lymphoma, non-Hodgkins lymphoma, adenoma, squamous cell carcinoma, laryngeal carcinoma, gallbladder and bile duct cancers, cancers of the retina such as retinoblastoma, cancers of the esophagus, gastric cancers, multiple myeloma, ovarian cancer, uterine cancer, thyroid cancer, testicular cancer, endometrial cancer, melanoma, colorectal cancer, lung cancer, bladder cancer, prostate cancer, lung cancer (including non-small cell lung carcinoma), pancreatic cancer, sarcomas, Wilms' tumor, cervical cancer, head and neck cancer, skin cancers, nasopharyngeal carcinoma, liposarcoma, epithelial carcinoma, renal cell carcinoma, gallbladder adeno carcinoma, parotid adenocarcinoma, endometrial sarcoma, multidrug resistant cancers; and proliferative diseases and conditions, such as neovascularization associated with tumor angiogenesis, macular degeneration (e.g., wet/dry AMD), corneal neovascularization, diabetic retinopathy, neovascular glaucoma, myopic degeneration and other proliferative diseases and conditions such as restenosis and renal disease such as polycystic kidney disease, and any other cancer or proliferative disease, condition, trait, genotype or phenotype that can respond to the modulation of disease related gene expression in a cell or tissue, alone or in combination with other therapies.

[0244] By “ocular disease” as used herein is meant, any disease, condition, trait, genotype or phenotype of the eye and related structures, such as Cystoid Macular Edema, Asteroid Hyalosis, Pathological Myopia and Posterior Staphyloma, Toxocariasis (Ocular Larva Migrans), Retinal Vein Occlusion, Posterior Vitreous Detachment, Tractional Retinal Tears, Epiretinal Membrane, Diabetic Retinopathy, Lattice Degeneration, Retinal Vein Occlusion, Retinal Artery Occlusion, Macular Degeneration (e.g., age related macular degeneration such as wet AMD or dry AMD), Toxoplasmosis, Choroidal Melanoma, Acquired Retinoschisis, Hollenhorst Plaque, Idiopathic Central Serous Chorioretinopathy, Macular Hole, Presumed Ocular Histoplasmosis Syndrome, Retinal Macroaneursym, Retinitis Pigmentosa, Retinal Detachment, Hypertensive Retinopathy, Retinal Pigment Epithelium (RPE) Detachment, Papillophlebitis, Ocular Ischemic Syndrome, Coats' Disease, Leber's Miliary Aneurysm, Conjunctival Neoplasms, Allergic Conjunctivitis, Vernal Conjunctivitis, Acute Bacterial Conjunctivitis, Allergic Conjunctivitis &Vernal Keratoconjunctivitis, Viral Conjunctivitis, Bacterial Conjunctivitis, Chlamydial & Gonococcal Conjunctivitis, Conjunctival Laceration, Episcleritis, Scleritis, Pingueculitis, Pterygium, Superior Limbic Keratoconjunctivitis (SLK of Theodore), Toxic Conjunctivitis, Conjunctivitis with Pseudomembrane, Giant Papillary Conjunctivitis, Terrien's Marginal Degeneration, Acanthamoeba Keratitis, Fungal Keratitis, Filamentary Keratitis, Bacterial Keratitis, Keratitis Sicca/Dry Eye Syndrome, Bacterial Keratitis, Herpes Simplex Keratitis, Sterile Corneal Infiltrates, Phlyctenulosis, Corneal Abrasion & Recurrent Corneal Erosion, Corneal Foreign Body, Chemical Burs, Epithelial Basement Membrane Dystrophy (EBMD), Thygeson's Superficial Punctate Keratopathy, Corneal Laceration, Salzmann's Nodular Degeneration, Fuchs' Endothelial Dystrophy, Crystalline Lens Subluxation, Ciliary-Block Glaucoma, Primary Open-Angle Glaucoma, Pigment Dispersion Syndrome and Pigmentary Glaucoma, Pseudoexfoliation Syndrom and Pseudoexfoliative Glaucoma, Anterior Uveitis, Primary Open Angle Glaucoma, Uveitic Glaucoma & Glaucomatocyclitic Crisis, Pigment Dispersion Syndrome & Pigmentary Glaucoma, Acute Angle Closure Glaucoma, Anterior Uveitis, Hyphema, Angle Recession Glaucoma, Lens Induced Glaucoma, Pseudoexfoliation Syndrome and Pseudoexfoliative Glaucoma, Axenfeld-Rieger Syndrome, Neovascular Glaucoma, Pars Planitis, Choroidal Rupture, Duane's Retraction Syndrome, Toxic/Nutritional Optic Neuropathy, Aberrant Regeneration of Cranial Nerve III, Intracranial Mass Lesions, Carotid-Cavernous Sinus Fistula, Anterior Ischemic Optic Neuropathy, Optic Disc Edema & Papilledema, Cranial Nerve III Palsy, Cranial Nerve IV Palsy, Cranial Nerve VI Palsy, Cranial Nerve VII (Facial Nerve) Palsy, Horner's Syndrome, Internuclear Ophthalmoplegia, Optic Nerve Head Hypoplasia, Optic Pit, Tonic Pupil, Optic Nerve Head Drusen, Demyelinating Optic Neuropathy (Optic Neuritis, Retrobulbar Optic Neuritis), Amaurosis Fugax and Transient Ischemic Attack, Pseudotumor Cerebri, Pituitary Adenoma, Molluscum Contagiosum, Canaliculitis, Verruca and Papilloma, Pediculosis and Pthiriasis, Blepharitis, Hordeolum, Preseptal Cellulitis, Chalazion, Basal Cell Carcinoma, Herpes Zoster Ophthalmicus, Pediculosis & Phthiriasis, Blow-out Fracture, Chronic Epiphora, Dacryocystitis, Herpes Simplex Blepharitis, Orbital Cellulitis, Senile Entropion, and Squamous Cell Carcinoma.

[0245] By “inflammatory disease” or “inflammatory condition” as used herein is meant any disease, condition, trait, genotype or phenotype characterized by an inflammatory or allergic process as is known in the art, such as inflammation, acute inflammation, chronic inflammation, respiratory disease, atherosclerosis, restenosis, asthma, allergic rhinitis, atopic dermatitis, septic shock, rheumatoid arthritis, inflammatory bowl disease, inflammatory pelvic disease, pain, ocular inflammatory disease, celiac disease, Leigh Syndrome, Glycerol Kinase Deficiency, Familial eosinophilia (FE), autosomal recessive spastic ataxia, laryngeal inflammatory disease; Tuberculosis, Chronic cholecystitis, Bronchiectasis, Silicosis and other pneumoconioses, and any other inflammatory disease, TH2 mediated sensitization, condition, trait, genotype or phenotype that can respond to the modulation of disease related gene expression in a cell or tissue, alone or in combination with other therapies.

[0246] By “autoimmune disease” or “autoimmune condition” as used herein is meant, any disease, condition, trait, genotype or phenotype characterized by autoimmunity as is known in the art, such as multiple sclerosis, diabetes mellitus, lupus, celiac disease, Crohn's disease, ulcerative colitis, Guillain-Barre syndrome, scleroderms, Goodpasture's syndrome, Wegener's granulomatosis; autoimmune epilepsy, Rasmussen's encephalitis, Primary biliary sclerosis, Sclerosing cholangitis, Autoimmune hepatitis, Addison's disease, Hashimoto's thyroiditis, Fibromyalgia, Menier's syndrome; transplantation rejection (e.g., prevention of allograft rejection) pernicious anemia, rheumatoid arthritis, systemic lupus erythematosus, dermatomyositis, Sjogren's syndrome, lupus erythematosus, multiple sclerosis, myasthenia gravis, Reiter's syndrome, Grave's disease, and any other autoimmune disease, condition, trait, genotype or phenotype that can respond to the modulation of disease related gene expression in a cell or tissue, alone or in combination with other therapies.

[0247] By “neurologic disease” or “neurological disease” is meant any disease, disorder, or condition affecting the central or peripheral nervous system, including ADHD, AIDS—Neurological Complications, Absence of the Septum Pellucidum, Acquired Epileptiform Aphasia, Acute Disseminated Encephalomyelitis, Adrenoleukodystrophy, Agenesis of the Corpus Callosum, Agnosia, Aicardi Syndrome, Alexander Disease, Alpers' Disease, Alternating Hemiplegia, Alzheimer's Disease, Amyotrophic Lateral Sclerosis, Anencephaly, Aneurysm, Angelman Syndrome, Angiomatosis, Anoxia, Aphasia, Apraxia, Arachnoid Cysts, Arachnoiditis, Arnold-Chiari Malformation, Arteriovenous Malformation, Aspartame, Asperger Syndrome, Ataxia Telangiectasia, Ataxia, Attention Deficit-Hyperactivity Disorder, Autism, Autonomic Dysfunction, Back Pain, Barth Syndrome, Batten Disease, Behcet's Disease, Bell's Palsy, Benign Essential Blepharospasm, Benign Focal Amyotrophy, Benign Intracranial Hypertension, Bernhardt-Roth Syndrome, Binswanger's Disease, Blepharospasm, Bloch-Sulzberger Syndrome, Brachial Plexus Birth Injuries, Brachial Plexus Injuries, Bradbury-Eggleston Syndrome, Brain Aneurysm, Brain Injury, Brain and Spinal Tumors, Brown-Sequard Syndrome, Bulbospinal Muscular Atrophy, Canavan Disease, Carpal Tunnel Syndrome, Causalgia, Cavernomas, Cavernous Angioma, Cavernous Malformation, Central Cervical Cord Syndrome, Central Cord Syndrome, Central Pain Syndrome, Cephalic Disorders, Cerebellar Degeneration, Cerebellar Hypoplasia, Cerebral Aneurysm, Cerebral Arteriosclerosis, Cerebral Atrophy, Cerebral Beriberi, Cerebral Gigantism, Cerebral Hypoxia, Cerebral Palsy, Cerebro-Oculo-Facio-Skeletal Syndrome, Charcot-Marie-Tooth Disorder, Chiari Malformation, Chorea, Choreoacanthocytosis, Chronic Inflammatory Demyelinating Polyneuropathy (CIDP), Chronic Orthostatic Intolerance, Chronic Pain, Cockayne Syndrome Type II, Coffin Lowry Syndrome, Coma, including Persistent Vegetative State, Complex Regional Pain Syndrome, Congenital Facial Diplegia, Congenital Myasthenia, Congenital Myopathy, Congenital Vascular Cavernous Malformations, Corticobasal Degeneration, Cranial Arteritis, Craniosynostosis, Creutzfeldt-Jakob Disease, Cumulative Trauma Disorders, Cushing's Syndrome, Cytomegalic Inclusion Body Disease (CIBD), Cytomegalovirus Infection, Dancing Eyes-Dancing Feet Syndrome, Dandy-Walker Syndrome, Dawson Disease, De Morsier's Syndrome, Dejerine-Klumpke Palsy, Dementia-Multi-Infarct, Dementia-Subcortical, Dementia With Lewy Bodies, Dermatomyositis, Developmental Dyspraxia, Devic's Syndrome, Diabetic Neuropathy, Diffuse Sclerosis, Dravet's Syndrome, Dysautonomia, Dysgraphia, Dyslexia, Dysphagia, Dyspraxia, Dystonias, Early Infantile Epileptic Encephalopathy, Empty Sella Syndrome, Encephalitis Lethargica, Encephalitis and Meningitis, Encephaloceles, Encephalopathy, Encephalotrigeminal Angiomatosis, Epilepsy, Erb's Palsy, Erb-Duchenne and Dejerine-Klumpke Palsies, Fabry's Disease, Fahr's Syndrome, Fainting, Familial Dysautonomia, Familial Hemangioma, Familial Idiopathic Basal Ganglia Calcification, Familial Spastic Paralysis, Febrile Seizures (e.g., GEFS and GEFS plus), Fisher Syndrome, Floppy Infant Syndrome, Friedreich's Ataxia, Gaucher's Disease, Gerstmann's Syndrome, Gerstmann-Straussler-Scheinker Disease, Giant Cell Arteritis, Giant Cell Inclusion Disease, Globoid Cell Leukodystrophy, Glossopharyngeal Neuralgia, Guillain-Barre Syndrome, HTLV-1 Associated Myelopathy, Hallervorden-Spatz Disease, Head Injury, Headache, Hemicrania Continua, Hemifacial Spasm, Hemiplegia Alterans, Hereditary Neuropathies, Hereditary Spastic Paraplegia, Heredopathia Atactica Polyneuritiformis, Herpes Zoster Oticus, Herpes Zoster, Hirayama Syndrome, Holoprosencephaly, Huntington's Disease, Hydranencephaly, Hydrocephalus-Normal Pressure, Hydrocephalus, Hydromyelia, Hypercortisolism, Hypersomnia, Hypertonia, Hypotonia, Hypoxia, Immune-Mediated Encephalomyelitis, Inclusion Body Myositis, Incontinentia Pigmenti, Infantile Hypotonia, Infantile Phytanic Acid Storage Disease, Infantile Refsum Disease, Infantile Spasms, Inflammatory Myopathy, Intestinal Lipodystrophy, Intracranial Cysts, Intracranial Hypertension, Isaac's Syndrome, Joubert Syndrome, Kearns-Sayre Syndrome, Kennedy's Disease, Kinsbourne syndrome, Kleine-Levin syndrome, Klippel Feil Syndrome, Klippel-Trenaunay Syndrome (KTS), Kluver-Bucy Syndrome, Korsakoffs Amnesic Syndrome, Krabbe Disease, Kugelberg-Welander Disease, Kuru, Lambert-Eaton Myasthenic Syndrome, Landau-Kleffner Syndrome, Lateral Femoral Cutaneous Nerve Entrapment, Lateral Medullary Syndrome, Learning Disabilities, Leigh's Disease, Lennox-Gastaut Syndrome, Lesch-Nyhan Syndrome, Leukodystrophy, Levine-Critchley Syndrome, Lewy Body Dementia, Lissencephaly, Locked-In Syndrome, Lou Gehrig's Disease, Lupus-Neurological Sequelae, Lyme Disease-Neurological Complications, Machado-Joseph Disease, Macrencephaly, Megalencephaly, Melkersson-Rosenthal Syndrome, Meningitis, Menkes Disease, Meralgia Paresthetica, Metachromatic Leukodystrophy, Microcephaly, Migraine, Miller Fisher Syndrome, Mini-Strokes, Mitochondrial Myopathies, Mobius Syndrome, Monomelic Amyotrophy, Motor Neuron Diseases, Moyamoya Disease, Mucolipidoses, Mucopolysaccharidoses, Multi-Infarct Dementia, Multifocal Motor Neuropathy, Multiple Sclerosis, Multiple System Atrophy with Orthostatic Hypotension, Multiple System Atrophy, Muscular Dystrophy, Myasthenia—Congenital, Myasthenia Gravis, Myelinoclastic Diffuse Sclerosis, Myoclonic Encephalopathy of Infants, Myoclonus, Myopathy—Congenital, Myopathy—Thyrotoxic, Myopathy, Myotonia Congenita, Myotonia, Narcolepsy, Neuroacanthocytosis, Neurodegeneration with Brain Iron Accumulation, Neurofibromatosis, Neuroleptic Malignant Syndrome, Neurological Complications of AIDS, Neurological Manifestations of Pompe Disease, Neuromyelitis Optica, Neuromyotonia, Neuronal Ceroid Lipofuscinosis, Neuronal Migration Disorders, Neuropathy-Hereditary, Neurosarcoidosis, Neurotoxicity, Nevus Cavernosus, Niemann-Pick Disease, O'Sullivan-McLeod Syndrome, Occipital Neuralgia, Occult Spinal Dysraphism Sequence, Ohtahara Syndrome, Olivopontocerebellar Atrophy, Opsoclonus Myoclonus, Orthostatic Hypotension, Overuse Syndrome, Pain-Chronic, Paraneoplastic Syndromes, Paresthesia, Parkinson's Disease, Parmyotonia Congenita, Paroxysmal Choreoathetosis, Paroxysmal Hemicrania, Parry-Romberg, Pelizaeus-Merzbacher Disease, Pena Shokeir II Syndrome, Perineural Cysts, Periodic Paralyses, Peripheral Neuropathy, Periventricular Leukomalacia, Persistent Vegetative State, Pervasive Developmental Disorders, Phytanic Acid Storage Disease, Pick's Disease, Piriformis Syndrome, Pituitary Tumors, Polymyositis, Pompe Disease, Porencephaly, Post-Polio Syndrome, Postherpetic Neuralgia, Postinfectious Encephalomyelitis, Postural Hypotension, Postural Orthostatic Tachycardia Syndrome, Postural Tachycardia Syndrome, Primary Lateral Sclerosis, Prion Diseases, Progressive Hemifacial Atrophy, Progressive Locomotor Ataxia, Progressive Multifocal Leukoencephalopathy, Progressive Sclerosing Poliodystrophy, Progressive Supranuclear Palsy, Pseudotumor Cerebri, Pyridoxine Dependent and Pyridoxine Responsive Siezure Disorders, Ramsay Hunt Syndrome Type I, Ramsay Hunt Syndrome Type II, Rasmussen's Encephalitis and other autoimmune epilepsies, Reflex Sympathetic Dystrophy Syndrome, Refsum Disease-Infantile, Refsum Disease, Repetitive Motion Disorders, Repetitive Stress Injuries, Restless Legs Syndrome, Retrovirus-Associated Myelopathy, Rett Syndrome, Reye's Syndrome, Riley-Day Syndrome, SUNCT Headache, Sacral Nerve Root Cysts, Saint Vitus Dance, Salivary Gland Disease, Sandhoff Disease, Schilder's Disease, Schizencephaly, Seizure Disorders, Septo-Optic Dysplasia, Severe Myoclonic Epilepsy of Infancy (SMEI), Shaken Baby Syndrome, Shingles, Shy-Drager Syndrome, Sjogren's Syndrome, Sleep Apnea, Sleeping Sickness, Soto's Syndrome, Spasticity, Spina Bifida, Spinal Cord Infarction, Spinal Cord Injury, Spinal Cord Tumors, Spinal Muscular Atrophy, Spinocerebellar Atrophy, Steele-Richardson-Olszewski Syndrome, Stiff-Person Syndrome, Striatonigral Degeneration, Stroke, Sturge-Weber Syndrome, Subacute Sclerosing Panencephalitis, Subcortical Arteriosclerotic Encephalopathy, Swallowing Disorders, Sydenham Chorea, Syncope, Syphilitic Spinal Sclerosis, Syringohydromyelia, Syringomyelia, Systemic Lupus Erythematosus, Tabes Dorsalis, Tardive Dyskinesia, Tarlov Cysts, Tay-Sachs Disease, Temporal Arteritis, Tethered Spinal Cord Syndrome, Thomsen Disease, Thoracic Outlet Syndrome, Thyrotoxic Myopathy, Tic Douloureux, Todd's Paralysis, Tourette Syndrome, Transient Ischemic Attack, Transmissible Spongiform Encephalopathies, Transverse Myelitis, Traumatic Brain Injury, Tremor, Trigeminal Neuralgia, Tropical Spastic Paraparesis, Tuberous Sclerosis, Vascular Erectile Tumor, Vasculitis including Temporal Arteritis, Von Economo's Disease, Von Hippel-Lindau disease (VHL), Von Recklinghausen's Disease, Wallenberg's Syndrome, Werdnig-Hoffman Disease, Wernicke-Korsakoff Syndrome, West Syndrome, Whipple's Disease, Williams Syndrome, Wilson's Disease, X-Linked Spinal and Bulbar Muscular Atrophy, and Zellweger Syndrome.

[0248] By “respiratory disease” is meant, any disease or condition affecting the respiratory tract, such as asthma, chronic obstructive pulmonary disease or “COPD”, allergic rhinitis, sinusitis, pulmonary vasoconstriction, inflammation, allergies, impeded respiration, respiratory distress syndrome, cystic fibrosis, pulmonary hypertension, pulmonary vasoconstriction, emphysema, and any other respiratory disease, condition, trait, genotype or phenotype that can respond to the modulation of disease related gene expression in a cell or tissue, alone or in combination with other therapies.

[0249] By “cardiovascular disease” is meant and disease or condition affecting the heart and vasculature, including but not limited to, coronary heart disease (CHD), cerebrovascular disease (CVD), aortic stenosis, peripheral vascular disease, atherosclerosis, arteriosclerosis, myocardial infarction (heart attack), cerebrovascular diseases (stroke), transient ischaemic attacks (TIA), angina (stable and unstable), atrial fibrillation, arrhythmia, vavular disease, and/or congestive heart failure.

[0250] In one embodiment of the present invention, each sequence of a siNA molecule of the invention is independently about 15 to about 30 nucleotides in length, in specific embodiments about 15, 16, 17, 18, 19, 20, 21, 22, 23, 24, 25, 26, 27, 28, 29, or 30 nucleotides in length. In another embodiment, the siNA duplexes of the invention independently comprise about 15 to about 30 base pairs (e.g., about 15, 16, 17, 18, 19, 20, 21, 22, 23, 24, 25, 26, 27, 28, 29, or 30). In another embodiment, one or more strands of the siNA molecule of the invention independently comprises about 15 to about 30 nucleotides (e.g., about 15, 16, 17, 18, 19, 20, 21, 22, 23, 24, 25, 26, 27, 28, 29, or 30) that are complementary to a target nucleic acid molecule. In yet another embodiment, siNA molecules of the invention comprising hairpin or circular structures are about 35 to about 55 (e.g., about 35, 40, 45, 50 or 55) nucleotides in length, or about 38 to about 44 (e.g., about 38, 39, 40, 41, 42, 43, or 44) nucleotides in length and comprising about 15 to about 25 (e.g., about 15, 16, 17, 18, 19, 20, 21, 22, 23, 24, or 25) base pairs. Exemplary siNA molecules of the invention are shown in Table II. Exemplary synthetic siNA molecules of the invention are shown in Table III and/or FIGS. 4-5.

[0251] As used herein “cell” is used in its usual biological sense, and does not refer to an entire multicellular organism, e.g., specifically does not refer to a human. The cell can be present in an organism, e.g., birds, plants and mammals such as humans, cows, sheep, apes, monkeys, swine, dogs, and cats. The cell can be prokaryotic (e.g., bacterial cell) or eukaryotic (e.g., mammalian or plant cell). The cell can be of somatic or germ line origin, totipotent or pluripotent, dividing or non-dividing. The cell can also be derived from or can comprise a gamete or embryo, a stem cell, or a fully differentiated cell.

[0252] The siNA molecules of the invention are added directly, or can be complexed with cationic lipids, packaged within liposomes, or otherwise delivered to target cells or tissues. The nucleic acid or nucleic acid complexes can be locally administered to relevant tissues ex vivo, or in vivo through direct dermal application, transdermal application, or injection, with or without their incorporation in biopolymers. In particular embodiments, the nucleic acid molecules of the invention comprise sequences shown in Tables II-III and/or FIGS. 4-5. Examples of such nucleic acid molecules consist essentially of sequences defined in these tables and figures. Furthermore, the chemically modified constructs described in Table IV can be applied to any siNA sequence of the invention.

[0253] In another aspect, the invention provides mammalian cells containing one or more siNA molecules of this invention. The one or more siNA molecules can independently be targeted to the same or different sites.

[0254] By “RNA” is meant a molecule comprising at least one ribonucleotide residue. By “ribonucleotide” is meant a nucleotide with a hydroxyl group at the 2′ position of a β-D-ribofuranose moiety. The terms include double-stranded RNA, single-stranded RNA, isolated RNA such as partially purified RNA, essentially pure RNA, synthetic RNA, recombinantly produced RNA, as well as altered RNA that differs from naturally occurring RNA by the addition, deletion, substitution and/or alteration of one or more nucleotides. Such alterations can include addition of non-nucleotide material, such as to the end(s) of the siNA or internally, for example at one or more nucleotides of the RNA. Nucleotides in the RNA molecules of the instant invention can also comprise non-standard nucleotides, such as non-naturally occurring nucleotides or chemically synthesized nucleotides or deoxynucleotides. These altered RNAs can be referred to as analogs or analogs of naturally-occurring RNA.

[0255] By “subject” is meant an organism, which is a donor or recipient of explanted cells or the cells themselves. “Subject” also refers to an organism to which the nucleic acid molecules of the invention can be administered. A subject can be a mammal or mammalian cells, including a human or human cells.

[0256] The term “phosphorothioate” as used herein refers to an internucleotide linkage having Formula I, wherein Z and/or W comprise a sulfur atom. Hence, the term phosphorothioate refers to both phosphorothioate and phosphorodithioate internucleotide linkages.

[0257] The term “phosphonoacetate” as used herein refers to an internucleotide linkage having Formula I, wherein Z and/or W comprise an acetyl or protected acetyl group.

[0258] The term “thiophosphonoacetate” as used herein refers to an internucleotide linkage having Formula I, wherein Z comprises an acetyl or protected acetyl group and W comprises a sulfur atom or alternately W comprises an acetyl or protected acetyl group and Z comprises a sulfur atom.

[0259] The term “universal base” as used herein refers to nucleotide base analogs that form base pairs with each of the natural DNA/RNA bases with little discrimination between them. Non-limiting examples of universal bases include C-phenyl, C-naphthyl and other aromatic derivatives, inosine, azole carboxamides, and nitroazole derivatives such as 3-nitropyrrole, 4-nitroindole, 5-nitroindole, and 6-nitroindole as known in the art (see for example Loakes, 2001, Nucleic Acids Research, 29, 2437-2447).

[0260] The term “acyclic nucleotide” as used herein refers to any nucleotide having an acyclic ribose sugar, for example where any of the ribose carbons (C1, C2, C3, C4, or C5), are independently or in combination absent from the nucleotide.

[0261] The nucleic acid molecules of the instant invention, individually, or in combination or in conjunction with other drugs, can be used to treat, inhibit, reduce, or prevent ocular disease, cancer, proliferative disease, inflammatory disease, respiratory disease, neurologic disease, allergic disease, renal disease, or angiogenesis in a subject or organism. For example, the siNA molecules can be administered to a subject or can be administered to other appropriate cells evident to those skilled in the art, individually or in combination with one or more drugs under conditions suitable for the treatment.

[0262] In a further embodiment, the siNA molecules can be used in combination with other known treatments to treat, inhibit, reduce, or prevent ocular disease, cancer, proliferative disease, inflammatory disease, respiratory disease, neurologic disease, allergic disease, renal disease, or angiogenesis in a subject or organism. For example, the described molecules could be used in combination with one or more known compounds, treatments, or procedures to treat, inhibit, reduce, or prevent ocular disease, cancer, proliferative disease, inflammatory disease, respiratory disease, neurologic disease, allergic disease, renal disease, or angiogenesis in a subject or organism as are known in the art.

[0263] In one embodiment, the invention features an expression vector comprising a nucleic acid sequence encoding at least one siNA molecule of the invention, in a manner which allows expression of the siNA molecule. For example, the vector can contain sequence(s) encoding both strands of a siNA molecule comprising a duplex. The vector can also contain sequence(s) encoding a single nucleic acid molecule that is self-complementary and thus forms a siNA molecule. Non-limiting examples of such expression vectors are described in Paul et al, 2002, Nature Biotechnology, 19, 505; Miyagishi and Taira, 2002, Nature Biotechnology, 19, 497; Lee et al, 2002, Nature Biotechnology, 19, 500; and Novina et al., 2002, Nature Medicine, advance online publication doi:10.1038/nm725.

[0264] In another embodiment, the invention features a mammalian cell, for example, a human cell, including an expression vector of the invention.

[0265] In yet another embodiment, the expression vector of the invention comprises a sequence for a siNA molecule having complementarity to a RNA molecule referred to by a Genbank Accession numbers, for example Genbank Accession Nos. shown in Table I.

[0266] In one embodiment, an expression vector of the invention comprises a nucleic acid sequence encoding two or more siNA molecules, which can be the same or different.

[0267] In another aspect of the invention, siNA molecules that interact with target RNA molecules and down-regulate gene encoding target RNA molecules (for example target RNA molecules referred to by Genbank Accession numbers herein) are expressed from transcription units inserted into DNA or RNA vectors. The recombinant vectors can be DNA plasmids or viral vectors. siNA expressing viral vectors can be constructed based on, but not limited to, adeno-associated virus, retrovirus, adenovirus, or alphavirus. The recombinant vectors capable of expressing the siNA molecules can be delivered as described herein, and persist in target cells. Alternatively, viral vectors can be used that provide for transient expression of siNA molecules. Such vectors can be repeatedly administered as necessary. Once expressed, the siNA molecules bind and down-regulate gene function or expression via RNA interference (RNAi). Delivery of siNA expressing vectors can be systemic, such as by intravenous or intramuscular administration, by administration to target cells ex-planted from a subject followed by reintroduction into the subject, or by any other means that would allow for introduction into the desired target cell.

[0268] By “vectors” is meant any nucleic acid- and/or viral-based technique used to deliver a desired nucleic acid.

[0269] Other features and advantages of the invention will be apparent from the following description of the preferred embodiments thereof, and from the claims.

### BRIEF DESCRIPTION OF THE DRAWINGS

[0270] FIG. 1 shows a non-limiting example of a scheme for the synthesis of siNA molecules. The complementary siNA sequence strands, strand 1 and strand 2, are synthesized in tandem and are connected by a cleavable linkage, such as a nucleotide succinate or abasic succinate, which can be the same or different from the cleavable linker used for solid phase synthesis on a solid support. The synthesis can be either solid phase or solution phase, in the example shown, the synthesis is a solid phase synthesis. The synthesis is performed such that a protecting group, such as a dimethoxytrityl group, remains intact on the terminal nucleotide of the tandem oligonucleotide. Upon cleavage and deprotection of the oligonucleotide, the two siNA strands spontaneously hybridize to form a siNA duplex, which allows the purification of the duplex by utilizing the properties of the terminal protecting group, for example by applying a trityl on purification method wherein only duplexes/oligonucleotides with the terminal protecting group are isolated.

[0271] FIG. 2 shows a MALDI-TOF mass spectrum of a purified siNA duplex synthesized by a method of the invention. The two peaks shown correspond to the predicted mass of the separate siNA sequence strands. This result demonstrates that the siNA duplex generated from tandem synthesis can be purified as a single entity using a simple trityl-on purification methodology.

[0272] FIG. 3 shows a non-limiting proposed mechanistic representation of target RNA degradation involved in RNAi. Double-stranded RNA (dsRNA), which is generated by RNA-dependent RNA polymerase (RdRP) from foreign single-stranded RNA, for example viral, transposon, or other exogenous RNA, activates the DICER enzyme that in turn generates siNA duplexes. Alternately, synthetic or expressed siNA can be introduced directly into a cell by appropriate means. An active siNA complex forms which recognizes a target RNA, resulting in degradation of the target RNA by the RISC endonuclease complex or in the synthesis of additional RNA by RNA-dependent RNA polymerase (RdRP), which can activate DICER and result in additional siNA molecules, thereby amplifying the RNAi response.

[0273] FIG. 4A-F shows non-limiting examples of chemically-modified siNA constructs of the present invention. In the figure, N stands for any nucleotide (adenosine, guanosine, cytosine, uridine, or optionally thymidine, for example thymidine can be substituted in the overhanging regions designated by parenthesis (N N). Various modifications are shown for the sense and antisense strands of the siNA constructs.

[0274] FIG. 4A: The sense strand comprises 21 nucleotides wherein the two terminal 3′-nucleotides are optionally base paired and wherein all nucleotides present are ribonucleotides except for (N N) nucleotides, which can comprise ribonucleotides, deoxynucleotides, universal bases, or other chemical modifications described herein. The antisense strand comprises 21 nucleotides, optionally having a 3′-terminal glyceryl moiety wherein the two terminal 3′-nucleotides are optionally complementary to the target RNA sequence, and wherein all nucleotides present are ribonucleotides except for (N N) nucleotides, which can comprise ribonucleotides, deoxynucleotides, universal bases, or other chemical modifications described herein. A modified internucleotide linkage, such as a phosphorothioate, phosphorodithioate or other modified internucleotide linkage as described herein, shown as “s”, optionally connects the (N N) nucleotides in the antisense strand.

[0275] FIG. 4B: The sense strand comprises 21 nucleotides wherein the two terminal 3′-nucleotides are optionally base paired and wherein all pyrimidine nucleotides that may be present are 2′deoxy-2′-fluoro modified nucleotides and all purine nucleotides that may be present are 2′-O-methyl modified nucleotides except for (N N) nucleotides, which can comprise ribonucleotides, deoxynucleotides, universal bases, or other chemical modifications described herein. The antisense strand comprises 21 nucleotides, optionally having a 3′-terminal glyceryl moiety and wherein the two terminal 3′-nucleotides are optionally complementary to the target RNA sequence, and wherein all pyrimidine nucleotides that may be present are 2′-deoxy-2′-fluoro modified nucleotides and all purine nucleotides that may be present are 2′-O-methyl modified nucleotides except for (N N) nucleotides, which can comprise ribonucleotides, deoxynucleotides, universal bases, or other chemical modifications described herein. A modified internucleotide linkage, such as a phosphorothioate, phosphorodithioate or other modified internucleotide linkage as described herein, shown as “s”, optionally connects the (N N) nucleotides in the sense and antisense strand.

[0276] FIG. 4C: The sense strand comprises 21 nucleotides having 5′- and 3′-terminal cap moieties wherein the two terminal 3′-nucleotides are optionally base paired and wherein all pyrimidine nucleotides that may be present are 2′-O-methyl or 2′-deoxy-2′-fluoro modified nucleotides except for (N N) nucleotides, which can comprise ribonucleotides, deoxynucleotides, universal bases, or other chemical modifications described herein. The antisense strand comprises 21 nucleotides, optionally having a 3′-terminal glyceryl moiety and wherein the two terminal 3′-nucleotides are optionally complementary to the target RNA sequence, and wherein all pyrimidine nucleotides that may be present are 2′-deoxy-2′-fluoro modified nucleotides except for (N N) nucleotides, which can comprise ribonucleotides, deoxynucleotides, universal bases, or other chemical modifications described herein. A modified internucleotide linkage, such as a phosphorothioate, phosphorodithioate or other modified internucleotide linkage as described herein, shown as “s”, optionally connects the (N N) nucleotides in the antisense strand.

[0277] FIG. 4D: The sense strand comprises 21 nucleotides having 5′- and 3′-terminal cap moieties wherein the two terminal 3′-nucleotides are optionally base paired and wherein all pyrimidine nucleotides that may be present are 2′-deoxy-2′-fluoro modified nucleotides except for (N N) nucleotides, which can comprise ribonucleotides, deoxynucleotides, universal bases, or other chemical modifications described herein and wherein and all purine nucleotides that may be present are 2′-deoxy nucleotides. The antisense strand comprises 21 nucleotides, optionally having a 3′-terminal glyceryl moiety and wherein the two terminal 3′-nucleotides are optionally complementary to the target RNA sequence, wherein all pyrimidine nucleotides that may be present are 2′-deoxy-2′-fluoro modified nucleotides and all purine nucleotides that may be present are 2′-O-methyl modified nucleotides except for (N N) nucleotides, which can comprise ribonucleotides, deoxynucleotides, universal bases, or other chemical modifications described herein. A modified internucleotide linkage, such as a phosphorothioate, phosphorodithioate or other modified internucleotide linkage as described herein, shown as “s”, optionally connects the (N N) nucleotides in the antisense strand.

[0278] FIG. 4E: The sense strand comprises 21 nucleotides having 5′- and 3′-terminal cap moieties wherein the two terminal 3′-nucleotides are optionally base paired and wherein all pyrimidine nucleotides that may be present are 2′-deoxy-2′-fluoro modified nucleotides except for (N N) nucleotides, which can comprise ribonucleotides, deoxynucleotides, universal bases, or other chemical modifications described herein. The antisense strand comprises 21 nucleotides, optionally having a 3′-terminal glyceryl moiety and wherein the two terminal 3′-nucleotides are optionally complementary to the target RNA sequence, and wherein all pyrimidine nucleotides that may be present are 2′-deoxy-2′-fluoro modified nucleotides and all purine nucleotides that may be present are 2′-O-methyl modified nucleotides except for (N N) nucleotides, which can comprise ribonucleotides, deoxynucleotides, universal bases, or other chemical modifications described herein. A modified internucleotide linkage, such as a phosphorothioate, phosphorodithioate or other modified internucleotide linkage as described herein, shown as “s”, optionally connects the (N N) nucleotides in the antisense strand.

[0279] FIG. 4F: The sense strand comprises 21 nucleotides having 5′- and 3′-terminal cap moieties wherein the two terminal 3′-nucleotides are optionally base paired and wherein all pyrimidine nucleotides that may be present are 2′-deoxy-2′-fluoro modified nucleotides except for (N N) nucleotides, which can comprise ribonucleotides, deoxynucleotides, universal bases, or other chemical modifications described herein and wherein and all purine nucleotides that may be present are 2′-deoxy nucleotides. The antisense strand comprises 21 nucleotides, optionally having a 3′-terminal glyceryl moiety and wherein the two terminal 3′-nucleotides are optionally complementary to the target RNA sequence, and having one 3′-terminal phosphorothioate internucleotide linkage and wherein all pyrimidine nucleotides that may be present are 2′-deoxy-2′-fluoro modified nucleotides and all purine nucleotides that may be present are 2′-deoxy nucleotides except for (N N) nucleotides, which can comprise ribonucleotides, deoxynucleotides, universal bases, or other chemical modifications described herein. A modified internucleotide linkage, such as a phosphorothioate, phosphorodithioate or other modified internucleotide linkage as described herein, shown as “s”, optionally connects the (N N) nucleotides in the antisense strand. The antisense strand of constructs A-F comprise sequence complementary to any target nucleic acid sequence of the invention. Furthermore, when a glyceryl moiety (L) is present at the 3′-end of the antisense strand for any construct shown in FIG. 4A-F, the modified internucleotide linkage is optional.

[0280] FIG. 5A-F shows non-limiting examples of specific chemically-modified siNA sequences of the invention. A-F applies the chemical modifications described in FIG. 4A-F to a VEGFR1 siNA sequence. Such chemical modifications can be applied to any VEGF and/or VEGFR sequence and/or cellular target sequence.

[0281] FIG. 6 shows non-limiting examples of different siNA constructs of the invention. The examples shown (constructs 1, 2, and 3) have 19 representative base pairs; however, different embodiments of the invention include any number of base pairs described herein. Bracketed regions represent nucleotide overhangs, for example, comprising about 1, 2, 3, or 4 nucleotides in length, preferably about 2 nucleotides. Constructs 1 and 2 can be used independently for RNAi activity. Construct 2 can comprise a polynucleotide or non-nucleotide linker, which can optionally be designed as a biodegradable linker. In one embodiment, the loop structure shown in construct 2 can comprise a biodegradable linker that results in the formation of construct 1 in vivo and/or in vitro. In another example, construct 3 can be used to generate construct 2 under the same principle wherein a linker is used to generate the active siNA construct 2 in vivo and/or in vitro, which can optionally utilize another biodegradable linker to generate the active siNA construct 1 in vivo and/or in vitro. As such, the stability and/or activity of the siNA constructs can be modulated based on the design of the siNA construct for use in vivo or in vitro and/or in vitro.

[0282] FIG. 7A-C is a diagrammatic representation of a scheme utilized in generating an expression cassette to generate siNA hairpin constructs.

[0283] FIG. 7A: A DNA oligomer is synthesized with a 5′-restriction site (R1) sequence followed by a region having sequence identical (sense region of siNA) to a predetermined VEGF and/or VEGFR target sequence, wherein the sense region comprises, for example, about 19, 20, 21, or 22 nucleotides (N) in length, which is followed by a loop sequence of defined sequence (X), comprising, for example, about 3 to about 10 nucleotides.

[0284] FIG. 7B: The synthetic construct is then extended by DNA polymerase to generate a hairpin structure having self-complementary sequence that will result in a siNA transcript having specificity for a VEGF and/or VEGFR target sequence and having self-complementary sense and antisense regions.

[0285] FIG. 7C: The construct is heated (for example to about 95° C.) to linearize the sequence, thus allowing extension of a complementary second DNA strand using a primer to the 3′-restriction sequence of the first strand. The double-stranded DNA is then inserted into an appropriate vector for expression in cells. The construct can be designed such that a 3′-terminal nucleotide overhang results from the transcription, for example, by engineering restriction sites and/or utilizing a poly-U termination region as described in Paul et al., 2002, Nature Biotechnology, 29, 505-508.

[0286] FIG. 8A-C is a diagrammatic representation of a scheme utilized in generating an expression cassette to generate double-stranded siNA constructs.

[0287] FIG. 8A: A DNA oligomer is synthesized with a 5′-restriction (R1) site sequence followed by a region having sequence identical (sense region of siNA) to a predetermined VEGF and/or VEGFR target sequence, wherein the sense region comprises, for example, about 19, 20, 21, or 22 nucleotides (N) in length, and which is followed by a 3′-restriction site (R2) which is adjacent to a loop sequence of defined sequence (X).

[0288] FIG. 8B: The synthetic construct is then extended by DNA polymerase to generate a hairpin structure having self-complementary sequence.

[0289] FIG. 8C: The construct is processed by restriction enzymes specific to R1 and R2 to generate a double-stranded DNA which is then inserted into an appropriate vector for expression in cells. The transcription cassette is designed such that a U6 promoter region flanks each side of the dsDNA which generates the separate sense and antisense strands of the siNA. Poly T termination sequences can be added to the constructs to generate U overhangs in the resulting transcript.

[0290] FIG. 9A-E is a diagrammatic representation of a method used to determine target sites for siNA mediated RNAi within a particular target nucleic acid sequence, such as messenger RNA.

[0291] FIG. 9A: A pool of siNA oligonucleotides are synthesized wherein the antisense region of the siNA constructs has complementarity to target sites across the target nucleic acid sequence, and wherein the sense region comprises sequence complementary to the antisense region of the siNA.

[0292] FIGS. 9B&C: (FIG. 9B) The sequences are pooled and are inserted into vectors such that (FIG. 9C) transfection of a vector into cells results in the expression of the siNA.

[0293] FIG. 9D: Cells are sorted based on phenotypic change that is associated with modulation of the target nucleic acid sequence.

[0294] FIG. 9E: The siNA is isolated from the sorted cells and is sequenced to identify efficacious target sites within the target nucleic acid sequence.

[0295] FIG. 10 shows non-limiting examples of different stabilization chemistries (1-10) that can be used, for example, to stabilize the 3′-end of siNA sequences of the invention, including (1) [3-3′]-inverted deoxyribose; (2) deoxyribonucleotide; (3) [5′-3′]-3′-deoxyribonucleotide; (4) [5′-3′]-ribonucleotide; (5) [5′-3′]-3′-O-methyl ribonucleotide; (6) 3′-glyceryl; (7) [3′-5′]-3′-deoxyribonucleotide; (8) [3′-3′]-deoxyribonucleotide; (9) [5′-2′]-deoxyribonucleotide; and (10) [5-3′]-dideoxyribonucleotide. In addition to modified and unmodified backbone chemistries indicated in the figure, these chemistries can be combined with different backbone modifications as described herein, for example, backbone modifications having Formula I. In addition, the 2′-deoxy nucleotide shown 5′ to the terminal modifications shown can be another modified or unmodified nucleotide or non-nucleotide described herein, for example modifications having any of Formulae I-VII or any combination thereof.

[0296] FIG. 11 shows a non-limiting example of a strategy used to identify chemically modified siNA constructs of the invention that are nuclease resistance while preserving the ability to mediate RNAi activity. Chemical modifications are introduced into the siNA construct based on educated design parameters (e.g. introducing 2′-mofications, base modifications, backbone modifications, terminal cap modifications etc). The modified construct in tested in an appropriate system (e.g. human serum for nuclease resistance, shown, or an animal model for PK/delivery parameters). In parallel, the siNA construct is tested for RNAi activity, for example in a cell culture system such as a luciferase reporter assay). Lead siNA constructs are then identified which possess a particular characteristic while maintaining RNAi activity, and can be further modified and assayed once again. This same approach can be used to identify siNA-conjugate molecules with improved pharmacokinetic profiles, delivery, and RNAi activity.

[0297] FIG. 12 shows non-limiting examples of phosphorylated siNA molecules of the invention, including linear and duplex constructs and asymmetric derivatives thereof.

[0298] FIG. 13 shows non-limiting examples of chemically modified terminal phosphate groups of the invention.

[0299] FIG. 14A shows a non-limiting example of methodology used to design self complementary DFO constructs utilizing palindrome and/or repeat nucleic acid sequences that are identified in a target nucleic acid sequence. (i) A palindrome or repeat sequence is identified in a nucleic acid target sequence. (ii) A sequence is designed that is complementary to the target nucleic acid sequence and the palindrome sequence. (iii) An inverse repeat sequence of the non-palindrome/repeat portion of the complementary sequence is appended to the 3′-end of the complementary sequence to generate a self complementary DFO molecule comprising sequence complementary to the nucleic acid target. (iv) The DFO molecule can self-assemble to form a double stranded oligonucleotide. FIG. 14B shows a non-limiting representative example of a duplex forming oligonucleotide sequence. FIG. 14C shows a non-limiting example of the self assembly schematic of a representative duplex forming oligonucleotide sequence. FIG. 14D shows a non-limiting example of the self assembly schematic of a representative duplex forming oligonucleotide sequence followed by interaction with a target nucleic acid sequence resulting in modulation of gene expression.

[0300] FIG. 15 shows a non-limiting example of the design of self complementary DFO constructs utilizing palindrome and/or repeat nucleic acid sequences that are incorporated into the DFO constructs that have sequence complementary to any target nucleic acid sequence of interest. Incorporation of these palindrome/repeat sequences allow the design of DFO constructs that form duplexes in which each strand is capable of mediating modulation of target gene expression, for example by RNAi. First, the target sequence is identified. A complementary sequence is then generated in which nucleotide or non-nucleotide modifications (shown as X or Y) are introduced into the complementary sequence that generate an artificial palindrome (shown as XYXYXY in the Figure). An inverse repeat of the non-palindrome/repeat complementary sequence is appended to the 3′-end of the complementary sequence to generate a self complementary DFO comprising sequence complementary to the nucleic acid target. The DFO can self-assemble to form a double stranded oligonucleotide.

[0301] FIG. 16 shows non-limiting examples of multifunctional siNA molecules of the invention comprising two separate polynucleotide sequences that are each capable of mediating RNAi directed cleavage of differing target nucleic acid sequences. FIG. 16A shows a non-limiting example of a multifunctional siNA molecule having a first region that is complementary to a first target nucleic acid sequence (complementary region 1) and a second region that is complementary to a second target nucleic acid sequence (complementary region 2), wherein the first and second complementary regions are situated at the 3′-ends of each polynucleotide sequence in the multifunctional siNA. The dashed portions of each polynucleotide sequence of the multifunctional siNA construct have complementarity with regard to corresponding portions of the siNA duplex, but do not have complementarity to the target nucleic acid sequences. FIG. 16B shows a non-limiting example of a multifunctional siNA molecule having a first region that is complementary to a first target nucleic acid sequence (complementary region 1) and a second region that is complementary to a second target nucleic acid sequence (complementary region 2), wherein the first and second complementary regions are situated at the 5′-ends of each polynucleotide sequence in the multifunctional siNA. The dashed portions of each polynucleotide sequence of the multifunctional siNA construct have complementarity with regard to corresponding portions of the siNA duplex, but do not have complementarity to the target nucleic acid sequences.

[0302] FIG. 17 shows non-limiting examples of multifunctional siNA molecules of the invention comprising a single polynucleotide sequence comprising distinct regions that are each capable of mediating RNAi directed cleavage of differing target nucleic acid sequences. FIG. 17A shows a non-limiting example of a multifunctional siNA molecule having a first region that is complementary to a first target nucleic acid sequence (complementary region 1) and a second region that is complementary to a second target nucleic acid sequence (complementary region 2), wherein the second complementary region is situated at the 3′-end of the polynucleotide sequence in the multifunctional siNA. The dashed portions of each polynucleotide sequence of the multifunctional siNA construct have complementarity with regard to corresponding portions of the siNA duplex, but do not have complementarity to the target nucleic acid sequences. FIG. 17B shows a non-limiting example of a multifunctional siNA molecule having a first region that is complementary to a first target nucleic acid sequence (complementary region 1) and a second region that is complementary to a second target nucleic acid sequence (complementary region 2), wherein the first complementary region is situated at the 5′-end of the polynucleotide sequence in the multifunctional siNA. The dashed portions of each polynucleotide sequence of the multifunctional siNA construct have complementarity with regard to corresponding portions of the siNA duplex, but do not have complementarity to the target nucleic acid sequences. In one embodiment, these multifunctional siNA constructs are processed in vivo or in vitro to generate multifunctional siNA constructs as shown in FIG. 16.

[0303] FIG. 18 shows non-limiting examples of multifunctional siNA molecules of the invention comprising two separate polynucleotide sequences that are each capable of mediating RNAi directed cleavage of differing target nucleic acid sequences and wherein the multifunctional siNA construct further comprises a self complementary, palindrome, or repeat region, thus enabling shorter bifuctional siNA constructs that can mediate RNA interference against differing target nucleic acid sequences. FIG. 18A shows a non-limiting example of a multifunctional siNA molecule having a first region that is complementary to a first target nucleic acid sequence (complementary region 1) and a second region that is complementary to a second target nucleic acid sequence (complementary region 2), wherein the first and second complementary regions are situated at the 3′-ends of each polynucleotide sequence in the multifunctional siNA, and wherein the first and second complementary regions further comprise a self complementary, palindrome, or repeat region. The dashed portions of each polynucleotide sequence of the multifunctional siNA construct have complementarity with regard to corresponding portions of the siNA duplex, but do not have complementarity to the target nucleic acid sequences. FIG. 18B shows a non-limiting example of a multifunctional siNA molecule having a first region that is complementary to a first target nucleic acid sequence (complementary region 1) and a second region that is complementary to a second target nucleic acid sequence (complementary region 2), wherein the first and second complementary regions are situated at the 5′-ends of each polynucleotide sequence in the multifunctional siNA, and wherein the first and second complementary regions further comprise a self complementary, palindrome, or repeat region. The dashed portions of each polynucleotide sequence of the multifunctional siNA construct have complementarity with regard to corresponding portions of the siNA duplex, but do not have complementarity to the target nucleic acid sequences.

[0304] FIG. 19 shows non-limiting examples of multifunctional siNA molecules of the invention comprising a single polynucleotide sequence comprising distinct regions that are each capable of mediating RNAi directed cleavage of differing target nucleic acid sequences and wherein the multifunctional siNA construct further comprises a self complementary, palindrome, or repeat region, thus enabling shorter bifuctional siNA constructs that can mediate RNA interference against differing target nucleic acid sequences. FIG. 19A shows a non-limiting example of a multifunctional siNA molecule having a first region that is complementary to a first target nucleic acid sequence (complementary region 1) and a second region that is complementary to a second target nucleic acid sequence (complementary region 2), wherein the second complementary region is situated at the 3′-end of the polynucleotide sequence in the multifunctional siNA, and wherein the first and second complementary regions further comprise a self complementary, palindrome, or repeat region. The dashed portions of each polynucleotide sequence of the multifunctional siNA construct have complementarity with regard to corresponding portions of the siNA duplex, but do not have complementarity to the target nucleic acid sequences. FIG. 19B shows a non-limiting example of a multifunctional siNA molecule having a first region that is complementary to a first target nucleic acid sequence (complementary region 1) and a second region that is complementary to a second target nucleic acid sequence (complementary region 2), wherein the first complementary region is situated at the 5′-end of the polynucleotide sequence in the multifunctional siNA, and wherein the first and second complementary regions further comprise a self complementary, palindrome, or repeat region. The dashed portions of each polynucleotide sequence of the multifunctional siNA construct have complementarity with regard to corresponding portions of the siNA duplex, but do not have complementarity to the target nucleic acid sequences. In one embodiment, these multifunctional siNA constructs are processed in vivo or in vitro to generate multifunctional siNA constructs as shown in FIG. 18.

[0305] FIG. 20 shows a non-limiting example of how multifunctional siNA molecules of the invention can target two separate target nucleic acid molecules, such as separate RNA molecules encoding differing proteins, for example, a cytokine and its corresponding receptor, differing viral strains, a virus and a cellular protein involved in viral infection or replication, or differing proteins involved in a common or divergent biologic pathway that is implicated in the maintenance of progression of disease. Each strand of the multifunctional siNA construct comprises a region having complementarity to separate target nucleic acid molecules. The multifunctional siNA molecule is designed such that each strand of the siNA can be utilized by the RISC complex to initiate RNA interference mediated cleavage of its corresponding target. These design parameters can include destabilization of each end of the siNA construct (see for example Schwarz et al., 2003, Cell, 115, 199-208). Such destabilization can be accomplished for example by using guanosine-cytidine base pairs, alternate base pairs (e.g., wobbles), or destabilizing chemically modified nucleotides at terminal nucleotide positions as is known in the art.

[0306] FIG. 21 shows a non-limiting example of how multifunctional siNA molecules of the invention can target two separate target nucleic acid sequences within the same target nucleic acid molecule, such as alternate coding regions of a RNA, coding and non-coding regions of a RNA, or alternate splice variant regions of a RNA. Each strand of the multifunctional siNA construct comprises a region having complementarity to the separate regions of the target nucleic acid molecule. The multifunctional siNA molecule is designed such that each strand of the siNA can be utilized by the RISC complex to initiate RNA interference mediated cleavage of its corresponding target region. These design parameters can include destabilization of each end of the siNA construct (see for example Schwarz et al., 2003, Cell, 115, 199-208). Such destabilization can be accomplished for example by using guanosine-cytidine base pairs, alternate base pairs (e.g., wobbles), or destabilizing chemically modified nucleotides at terminal nucleotide positions as is known in the art.

[0307] FIG. 22 shows a non-limiting example of reduction of VEGFR1 mRNA in A375 cells mediated by chemically-modified siNAs that target VEGFR1 mRNA. A549 cells were transfected with 0.25 ug/well of lipid complexed with 25 nM siNA. A screen of siNA constructs (Stabilization “Stab” chemistries are shown in Table IV, constructs are referred to by Compound number, see Table III) comprising Stab 4/5 chemistry (Compound 31190/31193), Stab 1/2 chemistry (Compound 31183/31186 and Compound 31184/31187), and unmodified RNA (Compound 30075/30076) were compared to untreated cells, matched chemistry inverted control siNA constructs, (Compound 31208/31211, Compound 31201/31204, Compound 31202/31205, and Compound 30077/30078) scrambled siNA control constructs (Scram1 and Scram2), and cells transfected with lipid alone (transfection control). All of the siNA constructs show significant reduction of VEGFR1 RNA expression.

[0308] FIG. 23 shows a non-limiting example of reduction of VEGFR1 mRNA levels in HAEC cell culture using Stab 9/10 directed against eight sites in VEGFR1 mRNA compared to matched chemistry inverted controls siNA constructs. Controls UNT and LF2K refer to untreated cells and cells treated with LF2K transfection reagent alone, respectively.

[0309] FIG. 24 shows a non-limiting example of reduction of VEGFR2 mRNA in HAEC cells mediated by chemically-modified siNAs that target VEGFR2 mRNA. HAEC cells were transfected with 0.25 ug/well of lipid complexed with 25 nM siNA. A screen of siNA constructs (Stabilization “Stab” chemistries are shown in Table IV, constructs are referred to by Compound No., see Table III) in site 3854 comprising Stab 4/5 chemistry (Compound No. 30786/30790), Stab 7/8 chemistry (Compound No. 31858/31860), and Stab 9/10 chemistry (Compound No. 31862/31864) and in site 3948 comprising Stab 4/5 chemistry (Compound No. 31856/31857), Stab 7/8 chemistry (Compound No. 31859/31861), and Stab 9/10 chemistry (Compound No. 31863/31865) were compared to untreated cells, matched chemistry inverted control siNA constructs in site 3854 (Compound No. 31878/31880, Compound No. 31882/31884, and Compound No. 31886/31888), and in site 3948 (Compound No. 31879/31881, Compound No. 31883/31885, and Compound No. 31887/31889), cells transfected with LF2K (transfection reagent), and an all RNA control (Compound No. 31435/31439 in site 3854 and Compound No. 31437/31441 in site 3948). All of the siNA constructs show significant reduction of VEGFR2 RNA expression.

[0310] FIG. 25 shows a non-limiting example of reduction of VEGFR2 mRNA levels in HAEC cell culture using Stab 0/0 directed against four sites in VEGFR2 mRNA compared to irrelevant control siNA constructs (IC1, IC2). Controls UNT and LF2K refer to untreated cells and cells treated with LF2K transfection reagent alone, respectively.

[0311] FIG. 26 shows non-limiting examples of reduction of VEGFR1 (Flt-1) mRNA levels in HAEC cells (15,000 cells/well) 24 hours after treatment with siNA molecules targeting sequences having VEGFR1 (Flt-1) and VEGFR2 (KDR) homology. HAEC cells were transfected with 1.5 ug/well of lipid complexed with 25 nM siNA. Activity of the siNA moleclues is shown compared to matched chemistry inverted siNA controls, untreated cells, and cells treated with lipid only (transfection control). siNA molecules and controls are referred to by compound numbers (sense/antisense), see Table III for sequences. FIG. 26A shows data for Stab 9/10 siNA constructs. FIG. 26B shows data for Stab 7/8 siNA constructs. The FIG. 26B study includes a construct that targets only VEGFR1 (32748/32755) and a matched chemistry inverted control thereof (32772/32779) as additional controls. As shown in the figures, the siNA constructs that target both VEGFR1 and VEGFR2 sequences demonstrate potent efficacy in inhibiting VEGFR1 expression in cell cuture experiments.

[0312] FIG. 27 shows non-limiting examples of reduction of VEGFR2 (KDR) mRNA levels in HAEC cells (15,000 cells/well) 24 hours after treatment with siNA molecules targeting sequences having VEGFR1 and VEGFR2 homology. HAEC cells were transfected with 1.5 ug/well of lipid complexed with 25 nM siNA. Activity of the siNA moleclues is shown compared to matched chemistry inverted siNA controls, untreated cells, and cells treated with lipid only (transfection control). siNA molecules and controls are referred to by compound numbers (sense/antisense), see Table III for sequences. FIG. 27A shows data for Stab 9/10 siNA constructs. FIG. 237 shows data for Stab 7/8 siNA constructs. The FIG. 27B study includes a construct that targets only VEGFR1 (32748/32755) and a matched chemistry inverted control thereof (32772/32779) as additional controls. As shown in the figures, the siNA constructs that target both VEGFR1 and VEGFR2 sequences demonstrate potent efficacy in inhibiting VEGFR2 expression in cell cuture experiments.

[0313] FIG. 28 shows a non-limiting example of siNA mediated inhibition of VEGF-induced angiogenesis using the rat corneal model of angiogenesis. siNA targeting site 2340 of VEGFR1 RNA (shown as Compound No. 29695/29699 sense strand/antisense strand) was compared to an inverted control siNA (shown as Compound No. 29983/29984 sense strand/antisense strand) at three different concentrations (1 ug, 3 ug, and 10 ug) and compared to a VEGF control in which no siNA was administered. As shown in the Figure, siNA constructs targeting VEGFR1 RNA can provide significant inhibition of angiogenesis in the rat corneal model.

[0314] FIG. 29 shows a non-limiting example of inhibition of VEGF induced neovascularization in the rat corneal model. VEGFR1 site 349 active siNA having “Stab 9/10” chemistry (Compound No. 31270/31273) was tested for inhibition of VEGF-induced angiogenesis at three different concentrations (2.0 ug, 1.0 ug, and 0.1 ug dose response) as compared to a matched chemistry inverted control siNA construct (Compound No. 31276/31279) at each concentration and a VEGF control in which no siNA was administered. As shown in the figure, the active siNA construct having “Stab 9/10” chemistry (Compound No. 31270/31273) is highly effective in inhibiting VEGF-induced angiogenesis in the rat corneal model compared to the matched chemistry inverted control siNA at concentrations from 0.1 ug to 2.0 ug.

[0315] FIG. 30 shows a non-limiting example of a study in which sites adjacent to VEGFR1 site 349 were evaluated for efficacy using two different siNA stabilization chemistries. Chemistry C=Stab 9/10 whereas Chemistry D=Stab 7/8.

[0316] FIG. 31 shows a non-limiting example of inhibition of VEGF induced ocular angiogenesis using siNA constructs that target homologous sequences shared by VEGFR1 and VEGFR2 via subconjuctival administration of the siNA after VEGF disk implantation. siNA constructs were administered intraocularly on days 1 and 7 following laser induced injury to the choroid, and choroidal neovascularization assessed on day 14.

[0317] FIG. 32 shows a non-limiting example of inhibition of VEGF induced neovascularization in a mouse model of coroidal neovascularization via intraocular administration of siNA. VEGFR1 site 349 active siNA having “Stab 9/10” chemistry (Compound No. 31270/31273) was tested for inhibition of neovascularization at two different concentrations (1.5 ug, and 0.5 ug) as compared to a matched chemistry inverted control siNA construct (Compound No. 31276/31279) and phosphate buffered saline (PBS). siNA constructs were administered intraocularly on days 1 and 7 following laser induced injury to the choroid, and choroidal neovascularization assessed on day 14. As shown in the figure, the active siNA construct having “Stab 9/10” chemistry (Compound No. 31270/31273) is highly effective in inhibiting neovascularization via intraocular administration in this model.

[0318] FIG. 33 shows a non-limiting example of inhibition of VEGF induced neovascularization in a mouse model of coroidal neovascularization via periocular administration of siNA. VEGFR1 site 349 active siNA having “Stab 9/10” chemistry (Compound No. 31270/31273) was tested for inhibition of neovascularization at two different concentrations (1.5 ug with a saline control, and 0.5 ug with an inverted siNA control, Compound No. 31276/31279). Eight mice were used in each arm of the study with one eye receiving the active siNA and the other eye receiving the saline or inverted control. siNA constructs and controls were adminitered daily up to 14 days, and neovascularization was assessed at day 17 following laser induced injury to the choroid. As shown in the figure, the active siNA construct having “Stab 9/10” chemistry (Compound No. 31270/31273) is highly effective in inhibiting neovascularization via periocular administration in this model.

[0319] FIG. 34 shows another non-limiting example of inhibition of VEGF induced neovascularization in a mouse model of coroidal neovascularization via periocular administration of siNA. VEGFR1 site 349 active siNA having “Stab 9/10” chemistry (Compound No. 31270/31273) was tested for inhibition of neovascularization at two different concentrations (1.5 ug with an inverted siNA control, Compound No. 31276/31279 and 0.5 ug with a saline control). Nine mice were used in the active versus inverted arm of the study with one eye receiving the active siNA and the other eye receiving the inverted control. Eight mice were used in the active versus saline arm of the study with one eye receiving the active siNA and the other eye receiving the saline control. siNA constructs and controls were administered daily up to 14 days, and neovascularization was assessed at day 17 following laser induced injury to the choroid. As shown in the figure, the active siNA construct having “Stab 9/10” chemistry (Compound No. 31270/31273) is highly effective in inhibiting neovascularization via periocular administration in this model.

[0320] FIG. 35 shows a non-limiting example of siNA mediated inhibition of choroidal neovascularization (CNV) in mice injected with active siNA (31270/31273) targeting site 349 of VEGFR1 mRNA compared to mice injected with a matched chemistry inverted control siNA construct (31276/31279) in a mouse model of ocular neovascularization. Periocular injections were performed every three days after rupture of Bruch's membrane. Eyes treated with active siNA had significantly smaller areas of CNV than eyes treated with inverted control siNA constructs (n=13, p=0.0002).

[0321] FIG. 36 shows a non-limiting example of siNA mediated inhibition of VEGFR1 mRNA levels in mice injected with active siNA (31270/31273) targeting site 349 of VEGFR1 mRNA compared to mice injected with a matched chemistry inverted control siNA construct (31276/31279) in a mouse model of oxygen induced retinopathy (OIR). Periocular injections of VEGFR1 siNA (31270/31273) (5 μl; 1.5 μg/μl) on P12, P14, and P16 significantly reduced VEGFR1 mRNA expression compared to injections with a matched chemistry inverted control siNA construct (31276/31279), (40% inhibition; n=9, p=0.0121).

[0322] FIG. 37 shows a non-limiting example of siNA mediated inhibition of VEGFR1 protein levels in mice injected with active siNA (31270/31273) targeting site 349 of VEGFR1 mRNA compared to mice injected with a matched chemistry inverted control siNA construct (31276/31279) in a mouse model of oxygen induced retinopathy (OIR). Intraocular injections of VEGFR1 siNA (31270/31273) (5 μg), significantly reduced VEGFR1 protein levels compared to injections with a matched chemistry inverted control siNA construct (31276/31279), (30% inhibition; n=7, p=0.0103).

[0323] FIG. 38 shows a non-limiting example of the reduction of primary tumor volume in a mouse 4T1-luciferase mammary carcinoma syngeneic tumor model using active Stab 9/10 siNA targeting site 349 of VEGFR1 RNA (Compound # 31270/31273) compared to a matched chemistry inactive inverted control siNA (Compound # 31276/31279) and saline. As shown in the figure, the active siNA construct is effective in reducing tumor volume in this model.

[0324] FIG. 39 shows a non-limiting example of the reduction of soluble VEGFR1 serum levels in a mouse 4T1-luciferase mammary carcinoma syngeneic tumor model using active Stab 9/10 siNA targeting site 349 of VEGFR1 RNA (Compound # 31270/31273) compared to a matched chemistry inactive inverted control siNA (Compound # 31276/31279). As shown in the figure, the active siNA construct is effective in reducing soluble VEGFR1 serum levels in this model.

[0325] FIG. 40 shows the results of a study in which multifunctional siNAs targeting VEGF site 1420 and VEGFR1/VEGFR2 conserved site 3646/3718 (MF 34702/34703), VEGF site 1423 and VEGFR1/VEGFR2 conserved site 3646/3718 (MF 34706/34707), VEGF site 1421 and VEGFR1NEGFR2 conserved site 3646/3718 (MF 34708/34709) and VEGF site 1562 and VEGFR1/VEGFR2 conserved site 3646/3718 (MF 34695/34700) were evaluated at 25 nM with irrelevant multifunctional siNA controls having differing lengths corresponding to the differing multifunctional lengths (IC-1, IC-2, IC-3, and IC-4) and individual siNA constructs targeting VEGF sites 1420 (32530/32548), 1421 (32531/32549), and 1562 (34682/34690) along with untreated cells. Compound numbers for the siNA constructs are shown in Table III. (A) Data is shown as the ratio of Renilla/Firefly luminescence for VEGF expression. (B) Data is shown as the ratio of Renilla/Firefly luminescence for VEGFR1 expression. (C) Data is shown as the ratio of Renilla/Firefly luminescence for VEGFR2 expression. As shown in the figures, the multifunctional siNA constructs show selective inhibition of VEGF, VEGFR1, and VEGFR2 compared to untreated cells and irrelevant matched chemistry and matched length controls.

[0326] FIG. 41 shows the results of a dose response study in which stabilized multifunctional siNAs targeting VEGF site 1562 and VEGFR1/VEGFR2 conserved site 3646/3718 (MF 37538/37579) was evaluated at 0.02 to 10 nM compared to individual siNA constructs targeting VEGF site 1562 (37575/37577) and VEGFR1/VEGFR2 conserved site 3646/3718 (33726/37576) and pooled individual siNA constructs targeting VEGF site 1562 (37575/37577) and VEGFR1/VEGFR2 conserved site 3646/3718 (33726/37576). Compound numbers for the siNA constructs are shown in Table III. (A) Data is shown as the ratio of Renilla/Firefly luminescence for VEGF expression. (B) Data is shown as the ratio of Renilla/Firefly luminescence for VEGFR1 expression. (C) Data is shown as the ratio of Renilla/Firefly luminescence for VEGFR2 expression. As shown in the figures, the stabilized multifunctional siNA constructs show selective inhibition of VEGF, VEGFR1, and VEGFR2 that is similar to the corresponding individual and pooled siNA constructs.

[0327] FIG. 42 shows the results of a study in which various non-nucleotide tethered multifunctional siNAs targeting VEGF site 1421 and VEGFR1/VEGFR2 conserved site 3646/3718 were evaluated at 25 nM compared to untreated cells (no siRNA), irrelevant siNA controls targeting HCV RNA site 327 (HCV 327, 34585/36447), individual active siNA constructs targeting VEGF site 1421 (32531/32549) and VEGFR1/VEGFR2 conserved site 3646/3718 (32236/32551), an irrelevant matched length multifunctional siNA construct (35414/36447/36446). Each construct was evaluated for VEGF, VEGFR1 (Flt), or VEGFR2 (KDR) expression levels as determined by the ratio of renilla to firefly luciferase signal. Data is shown for active tethered multifunctional siNA having a hexaethylene glycol tether (36425/32251/32549), C12 tether (36426/32251/32549), tetraethylene glycol tether (36427/32251/32549), C3 tether (36428/32251/32549) and double hexaethylene glycol tether (36429/32251/32549). Compound numbers for the siNA constructs are shown in Table III. As shown in the figure, the non-nucleotide tethered multifunctional siNA constructs show similar activity to the corresponding individual siNA constructs targeting VEGF, VEGFR1, and VEGFR2.

[0328] FIG. 43(A-H) shows non-limiting examples of tethered multiifunctional siNA constructs of the invention. In the examples shown, a linker (e.g., nucleotide or non-nucleotide linker) connects two siNA regions (e.g., two sense, two antisense, or alternately a sense and an antisense region together. Separate sense (or sense and antisense) sequences corresponding to a first target sequence and second target sequence are hybridized to their corresponding sense and/or antisense sequences in the multifunctional siNA. In addition, various conjugates, ligands, aptamers, polymers or reporter molecules can be attached to the linker region for selective or improved delivery and/or pharmacokinetic properties.

[0329] FIG. 44 shows a non-limiting example of various dendrimer based multifunctional siNA designs.

[0330] FIG. 45 shows a non-limiting example of various supramolecular multifunctional siNA designs.

[0331] FIG. 46 shows a non-limiting example of a dicer enabled multifunctional siNA design using a 30 nucleotide precursor siNA construct. A 30 base pair duplex is cleaved by Dicer into 22 and 8 base pair products from either end (8 b.p. fragments not shown). For ease of presentation the overhangs generated by dicer are not shown—but can be compensated for. Three targeting sequences are shown. The required sequence identity overlapped is indicated by grey boxes. The N's of the parent 30 b.p. siNA are suggested sites of 2′-OH positions to enable Dicer cleavage if this is tested in stabilized chemistries. Note that processing of a 30mer duplex by Dicer RNase III does not give a precise 22+8 cleavage, but rather produces a series of closely related products (with 22+8 being the primary site). Therefore, processing by Dicer will yield a series of active siNAs.

[0332] FIG. 47 shows a non-limiting example of a dicer enabled multifunctional siNA design using a 40 nucleotide precursor siNA construct. A 40 base pair duplex is cleaved by Dicer into 20 base pair products from either end. For ease of presentation the overhangs generated by dicer are not shown—but can be compensated for. Four targeting sequences are shown in four colors, blue, light-blue and red and orange. The required sequence identity overlapped is indicated by grey boxes. This design format can be extended to larger RNAs. If chemically stabilized siNAs are bound by Dicer, then strategically located ribonucleotide linkages can enable designer cleavage products that permit our more extensive repertoire of multiifunctional designs. For example cleavage products not limited to the Dicer standard of approximately 22-nucleotides can allow multifunctional siNA constructs with a target sequence identity overlap ranging from, for example, about 3 to about 15 nucleotides.

[0333] FIG. 48 shows a non-limiting example of inhibition of HBV RNA by dicer enabled multifunctional siNA constructs targeting HBV site 263. When the first 17 nucleotides of a siNA antisense strand (e.g., 21 nucleotide strands in a duplex with 3′-TT overhangs) are complementary to a target RNA, robust silencing was observed at 25 nM. 80% silencing was observed with only 16 nucleotide complementarity in the same format.

[0334] FIG. 49 shows a non-limiting example of additional multifunctional siNA construct designs of the invention. In one example, a conjugate, ligand, aptamer, label, or other moiety is attached to a region of the multifunctional siNA to enable improved delivery or pharmacokinetic profiling.

[0335] FIG. 50 shows a non-limiting example of additional multifunctional siNA construct designs of the invention. In one example, a conjugate, ligand, aptamer, label, or other moiety is attached to a region of the multifunctional siNA to enable improved delivery or pharmacokinetic profiling.

### DETAILED DESCRIPTION OF THE INVENTION

Mechanism of Action of Nucleic Acid Molecules of the Invention

[0336] The discussion that follows discusses the proposed mechanism of RNA interference mediated by short interfering RNA as is presently known, and is not meant to be limiting and is not an admission of prior art. Applicant demonstrates herein that chemically-modified short interfering nucleic acids possess similar or improved capacity to mediate RNAi as do siRNA molecules and are expected to possess improved stability and activity in vivo; therefore, this discussion is not meant to be limiting only to siRNA and can be applied to siNA as a whole. By “improved capacity to mediate RNAi” or “improved RNAi activity” is meant to include RNAi activity measured in vitro and/or in vivo where the RNAi activity is a reflection of both the ability of the siNA to mediate RNAi and the stability of the siNAs of the invention. In this invention, the product of these activities can be increased in vitro and/or in vivo compared to an all RNA siRNA or a siNA containing a plurality of ribonucleotides. In some cases, the activity or stability of the siNA molecule can be decreased (i.e., less than ten-fold), but the overall activity of the siNA molecule is enhanced in vitro and/or in vivo.

[0337] RNA interference refers to the process of sequence specific post-transcriptional gene silencing in animals mediated by short interfering RNAs (siRNAs) (Fire et al., 1998, Nature, 391, 806). The corresponding process in plants is commonly referred to as post-transcriptional gene silencing or RNA silencing and is also referred to as quelling in fungi. The process of post-transcriptional gene silencing is thought to be an evolutionarily-conserved cellular defense mechanism used to prevent the expression of foreign genes which is commonly shared by diverse flora and phyla (Fire et al., 1999, Trends Genet., 15, 358). Such protection from foreign gene expression may have evolved in response to the production of double-stranded RNAs (dsRNAs) derived from viral infection or the random integration of transposon elements into a host genome via a cellular response that specifically destroys homologous single-stranded RNA or viral genomic RNA. The presence of dsRNA in cells triggers the RNAi response though a mechanism that has yet to be fully characterized. This mechanism appears to be different from the interferon response that results from dsRNA-mediated activation of protein kinase PKR and 2′,5′-oligoadenylate synthetase resulting in non-specific cleavage of mRNA by ribonuclease L.

[0338] The presence of long dsRNAs in cells stimulates the activity of a ribonuclease III enzyme referred to as Dicer. Dicer is involved in the processing of the dsRNA into short pieces of dsRNA known as short interfering RNAs (siRNAs) (Berstein et al., 2001, Nature, 409, 363). Short interfering RNAs derived from Dicer activity are typically about 21 to about 23 nucleotides in length and comprise about 19 base pair duplexes. Dicer has also been implicated in the excision of 21- and 22-nucleotide small temporal RNAs (stRNAs) from precursor RNA of conserved structure that are implicated in translational control (Hutvagner et al., 2001, Science, 293, 834). The RNAi response also features an endonuclease complex containing a siRNA, commonly referred to as an RNA-induced silencing complex (RISC), which mediates cleavage of single-stranded RNA having sequence homologous to the siRNA. Cleavage of the target RNA takes place in the middle of the region complementary to the guide sequence of the siRNA duplex (Elbashir et al., 2001, Genes Dev., 15, 188). In addition, RNA interference can also involve small RNA (e.g., micro-RNA or miRNA) mediated gene silencing, presumably though cellular mechanisms that regulate chromatin structure and thereby prevent transcription of target gene sequences (see for example Allshire, 2002, Science, 297, 1818-1819; Volpe et al., 2002, Science, 297, 1833-1837; Jenuwein, 2002, Science, 297, 2215-2218; and Hall et al., 2002, Science, 297, 2232-2237). As such, siNA molecules of the invention can be used to mediate gene silencing via interaction with RNA transcripts or alternately by interaction with particular gene sequences, wherein such interaction results in gene silencing either at the transcriptional level or post-transcriptional level.

[0339] RNAi has been studied in a variety of systems. Fire et al., 1998, Nature, 391, 806, were the first to observe RNAI in C. elegans. Wianny and Goetz, 1999, Nature Cell Biol., 2, 70, describe RNAi mediated by dsRNA in mouse embryos. Hammond et al., 2000, Nature, 404, 293, describe RNAi in Drosophila cells transfected with dsRNA. Elbashir et al., 2001, Nature, 411, 494, describe RNAi induced by introduction of duplexes of synthetic 21-nucleotide RNAs in cultured mammalian cells including human embryonic kidney and HeLa cells. Recent work in Drosophila embryonic lysates has revealed certain requirements for siRNA length, structure, chemical composition, and sequence that are essential to mediate efficient RNAi activity. These studies have shown that 21 nucleotide siRNA duplexes are most active when containing two 2-nucleotide 3′-terminal nucleotide overhangs. Furthermore, substitution of one or both siRNA strands with 2′-deoxy or 2′-O-methyl nucleotides abolishes RNAi activity, whereas substitution of 3′-terminal siRNA nucleotides with deoxy nucleotides was shown to be tolerated. Mismatch sequences in the center of the siRNA duplex were also shown to abolish RNAi activity. In addition, these studies also indicate that the position of the cleavage site in the target RNA is defined by the 5′-end of the siRNA guide sequence rather than the 3′-end (Elbashir et al., 2001, EMBO J., 20, 6877). Other studies have indicated that a 5′-phosphate on the target-complementary strand of a siRNA duplex is required for siRNA activity and that ATP is utilized to maintain the 5′-phosphate moiety on the siRNA (Nykanen et al., 2001, Cell, 107, 309); however, siRNA molecules lacking a 5′-phosphate are active when introduced exogenously, suggesting that 5′-phosphorylation of siRNA constructs may occur in vivo.

Duplex Foming Oligonucleotides (DFO) of the Invention

[0340] In one embodiment, the invention features siNA molecules comprising duplex forming oligonucleotides (DFO) that can self-assemble into double stranded oligonucleotides. The duplex forming oligonucleotides of the invention can be chemically synthesized or expressed from transcription units and/or vectors. The DFO molecules of the instant invention provide useful reagents and methods for a variety of therapeutic, diagnostic, agricultural, veterinary, target validation, genomic discovery, genetic engineering and pharmacogenomic applications.

[0341] Applicant demonstrates herein that certain oligonucleotides, refered to herein for convenience but not limitation as duplex forming oligonucleotides or DFO molecules, are potent mediators of sequence specific regulation of gene expression. The oligonucleotides of the invention are distinct from other nucleic acid sequences known in the art (e.g., siRNA, miRNA, stRNA, shRNA, antisense oligonucleotides etc.) in that they represent a class of linear polynucleotide sequences that are designed to self-assemble into double stranded oligonucleotides, where each strand in the double stranded oligonucleotides comprises a nucleotide sequence that is complementary to a target nucleic acid molecule. Nucleic acid molecules of the invention can thus self assemble into functional duplexes in which each strand of the duplex comprises the same polynucleotide sequence and each strand comprises a nucleotide sequence that is complementary to a target nucleic acid molecule.

[0342] Generally, double stranded oligonucleotides are formed by the assembly of two distinct oligonucleotide sequences where the oligonucleotide sequence of one strand is complementary to the oligonucleotide sequence of the second strand; such double stranded oligonucleotides are assembled from two separate oligonucleotides, or from a single molecule that folds on itself to form a double stranded structure, often referred to in the field as hairpin stem-loop structure (e.g., shRNA or short hairpin RNA). These double stranded oligonucleotides known in the art all have a common feature in that each strand of the duplex has a distict nucleotide sequence.

[0343] Distinct from the double stranded nucleic acid molecules known in the art, the applicants have developed a novel, potentially cost effective and simplified method of forming a double stranded nucleic acid molecule starting from a single stranded or linear oligonucleotide. The two strands of the double stranded oligonucleotide formed according to the instant invention have the same nucleotide sequence and are not covalently linked to each other. Such double-stranded oligonucleotides molecules can be readily linked post-synthetically by methods and reagents known in the art and are within the scope of the invention. In one embodiment, the single stranded oligonucleotide of the invention (the duplex forming oligonucleotide) that forms a double stranded oligonucleotide comprises a first region and a second region, where the second region includes a nucleotide sequence that is an inverted repeat of the nucleotide sequence in the first region, or a portion thereof, such that the single stranded oligonucleotide self assembles to form a duplex oligonucleotide in which the nucleotide sequence of one strand of the duplex is the same as the nucleotide sequence of the second strand. Non-limiting examples of such duplex forming oligonucleotides are illustrated in FIGS. 14 and 15. These duplex forming oligonucleotides (DFOs) can optionally include certain palindrome or repeat sequences where such palindrome or repeat sequences are present in between the first region and the second region of the DFO.

[0344] In one embodiment, the invention features a duplex forming oligonucleotide (DFO) molecule, wherein the DFO comprises a duplex forming self complementary nucleic acid sequence that has nucleotide sequence complementary to a VEGF and/or VEGFR target nucleic acid sequence. The DFO molecule can comprise a single self complementary sequence or a duplex resulting from assembly of such self complementary sequences.

[0345] In one embodiment, a duplex forming oligonucleotide (DFO) of the invention comprises a first region and a second region, wherein the second region comprises a nucleotide sequence comprising an inverted repeat of nucleotide sequence of the first region such that the DFO molecule can assemble into a double stranded oligonucleotide. Such double stranded oligonucleotides can act as a short interfering nucleic acid (siNA) to modulate gene expression. Each strand of the double stranded oligonucleotide duplex formed by DFO molecules of the invention can comprise a nucleotide sequence region that is complementary to the same nucleotide sequence in a target nucleic acid molecule (e.g., target VEGF and/or VEGFR RNA).

[0346] In one embodiment, the invention features a single stranded DFO that can assemble into a double stranded oligonucleotide. The applicant has surprisingly found that a single stranded oligonucleotide with nucleotide regions of self complementarity can readily assemble into duplex oligonucleotide constructs. Such DFOs can assemble into duplexes that can inhibit gene expression in a sequence specific manner. The DFO moleucles of the invention comprise a first region with nucleotide sequence that is complementary to the nucleotide sequence of a second region and where the sequence of the first region is complementary to a target nucleic acid (e.g., RNA). The DFO can form a double stranded oligonucleotide wherein a portion of each strand of the double stranded oligonucleotide comprises a sequence complementary to a target nucleic acid sequence.

[0347] In one embodiment, the invention features a double stranded oligonucleotide, wherein the two strands of the double stranded oligonucleotide are not covalently linked to each other, and wherein each strand of the double stranded oligonucleotide comprises a nucleotide sequence that is complementary to the same nucleotide sequence in a target nucleic acid molecule or a portion thereof (e.g., VEGF and/or VEGFR RNA target). In another embodiment, the two strands of the double stranded oligonucleotide share an identical nucleotide sequence of at least about 15, preferably at least about 16, 17, 18, 19, 20, or 21 nucleotides.

[0348] In one embodiment, a DFO molecule of the invention comprises a structure having Formula DFO-I:
5′-p-XZX′-3′
wherein Z comprises a palindromic or repeat nucleic acid sequence optionally with one or more modified nucleotides (e.g., nucleotide with a modified base, such as 2-amino purine, 2-amino-1,6-dihydro purine or a universal base), for example of length about 2 to about 24 nucleotides in even numbers (e.g., about 2, 4, 6, 8, 10, 12, 14, 16, 18, 20, or 22 or 24 nucleotides), X represents a nucleic acid sequence, for example of length of about 1 to about 21 nucleotides (e.g., about 1, 2, 3, 4, 5, 6, 7, 8, 9, 10, 11, 12, 13, 14, 15, 16, 17, 18, 19, 20, or 21 nucleotides), X′ comprises a nucleic acid sequence, for example of length about 1 and about 21 nucleotides (e.g., about 1, 2, 3, 4, 5, 6, 7, 8, 9, 10, 11, 12, 13, 14, 15, 16, 17, 18, 19, 20 or 21 nucleotides) having nucleotide sequence complementarity to sequence X or a portion thereof, p comprises a terminal phosphate group that can be present or absent, and wherein sequence X and Z, either independently or together, comprise nucleotide sequence that is complementary to a target nucleic acid sequence or a portion thereof and is of length sufficient to interact (e.g., base pair) with the target nucleic acid sequence or a portion thereof (e.g., VEGF and/or VEGFR RNA target). For example, X independently can comprise a sequence from about 12 to about 21 or more (e.g., about 12, 13, 14, 15, 16, 17, 18, 19, 20, 21, or more) nucleotides in length that is complementary to nucleotide sequence in a target VEGF and/or VEGFR RNA or a portion thereof. In another non-limiting example, the length of the nucleotide sequence of X and Z together, when X is present, that is complementary to the target RNA or a portion thereof (e.g., VEGF and/or VEGFR RNA target) is from about 12 to about 21 or more nucleotides (e.g., about 12, 13, 14, 15, 16, 17, 18, 19, 20, 21, or more). In yet another non-limiting example, when X is absent, the length of the nucleotide sequence of Z that is complementary to the target VEGF and/or VEGFR RNA or a portion thereof is from about 12 to about 24 or more nucleotides (e.g., about 12, 14, 16, 18, 20, 22, 24, or more). In one embodiment X, Z and X′ are independently oligonucleotides, where X and/or Z comprises a nucleotide sequence of length sufficient to interact (e.g., base pair) with a nucleotide sequence in the target RNA or a portion thereof (e.g., VEGF and/or VEGFR RNA target). In one embodiment, the lengths of oligonucleotides X and X′ are identical. In another embodiment, the lengths of oligonucleotides X and X′ are not identical. In another embodiment, the lengths of oligonucleotides X and Z, or Z and X′, or X, Z and X′ are either identical or different.

[0349] When a sequence is described in this specification as being of “sufficient” length to interact (i.e., base pair) with another sequence, it is meant that the the length is such that the number of bonds (e.g., hydrogen bonds) formed between the two sequences is enough to enable the two sequence to form a duplex under the conditions of interest. Such conditions can be in vitro (e.g., for diagnostic or assay purposes) or in vivo (e.g., for therapeutic purposes). It is a simple and routine matter to determine such lengths.

[0350] In one embodiment, the invention features a double stranded oligonucleotide construct having Formula DFO-I(a):
5′-p-XZX′-3′
3′-X′ZX-p-5′
wherein Z comprises a palindromic or repeat nucleic acid sequence or palindromic or repeat-like nucleic acid sequence with one or more modified nucleotides (e.g., nucleotides with a modified base, such as 2-amino purine, 2-amino-1,6-dihydro purine or a universal base), for example of length about 2 to about 24 nucleotides in even numbers (e.g., about 2, 4, 6, 8, 10, 12, 14, 16, 18, 20, 22 or 24 nucleotides), X represents a nucleic acid sequence, for example of length about 1 to about 21 nucleotides (e.g., about 1, 2, 3, 4, 5, 6, 7, 8, 9, 10, 11, 12, 13, 14, 15, 16, 17, 18, 19, 20, or 21 nucleotides), X′ comprises a nucleic acid sequence, for example of length about 1 to about 21 nucleotides (e.g., about 1, 2, 3, 4, 5, 6, 7, 8, 9, 10, 11, 12, 13, 14, 15, 16, 17, 18, 19, 20 or 21 nucleotides) having nucleotide sequence complementarity to sequence X or a portion thereof, p comprises a terminal phosphate group that can be present or absent, and wherein each X and Z independently comprises a nucleotide sequence that is complementary to a target nucleic acid sequence or a portion thereof (e.g., VEGF and/or VEGFR RNA target) and is of length sufficient to interact with the target nucleic acid sequence of a portion thereof (e.g., VEGF and/or VEGFR RNA target). For example, sequence X independently can comprise a sequence from about 12 to about 21 or more nucleotides (e.g., about 12, 13, 14, 15, 16, 17, 18, 19, 20, 21, or more) in length that is complementary to a nucleotide sequence in a target RNA or a portion thereof (e.g., VEGF and/or VEGFR RNA target). In another non-limiting example, the length of the nucleotide sequence of X and Z together (when X is present) that is complementary to the target VEGF and/or VEGFR RNA or a portion thereof is from about 12 to about 21 or more nucleotides (e.g., about 12, 13, 14, 15, 16, 17, 18, 19, 20, 21, or more). In yet another non-limiting example, when X is absent, the length of the nucleotide sequence of Z that is complementary to the target VEGF and/or VEGFR RNA or a portion thereof is from about 12 to about 24 or more nucleotides (e.g., about 12, 14, 16, 18, 20, 22, 24 or more). In one embodiment X, Z and X′ are independently oligonucleotides, where X and/or Z comprises a nucleotide sequence of length sufficient to interact (e.g., base pair) with nucleotide sequence in the target RNA or a portion thereof (e.g., VEGF and/or VEGFR RNA target). In one embodiment, the lengths of oligonucleotides X and X′ are identical. In another embodiment, the lengths of oligonucleotides X and X′ are not identical. In another embodiment, the lengths of oligonucleotides X and Z or Z and X′ or X, Z and X′ are either identical or different. In one embodiment, the double stranded oligonucleotide construct of Formula I(a) includes one or more, specifically 1, 2, 3 or 4, mismatches, to the extent such mismatches do not significantly diminish the ability of the double stranded oligonucleotide to inhibit target gene expression.

[0351] In one embodiment, a DFO molecule of the invention comprises structure having Formula DFO-II:
5′-p-XX′-3′
wherein each X and X′ are independently oligonucleotides of length about 12 nucleotides to about 21 nucleotides, wherein X comprises, for example, a nucleic acid sequence of length about 12 to about 21 nucleotides (e.g., about 12, 13, 14, 15, 16, 17, 18, 19, 20 or 21 nucleotides), X′ comprises a nucleic acid sequence, for example of length about 12 to about 21 nucleotides (e.g., about 12, 13, 14, 15, 16, 17, 18, 19, 20, or 21 nucleotides) having nucleotide sequence complementarity to sequence X or a portion thereof, p comprises a terminal phosphate group that can be present or absent, and wherein X comprises a nucleotide sequence that is complementary to a target nucleic acid sequence (e.g., VEGF and/or VEGFR RNA) or a portion thereof and is of length sufficient to interact (e.g., base pair) with the target nucleic acid sequence of a portion thereof. In one embodiment, the length of oligonucleotides X and X′ are identical. In another embodiment the length of oligonucleotides X and X′ are not identical. In one embodiment, length of the oligonucleotides X and X′ are sufficint to form a relatively stable double stranded oligonucleotide.

[0352] In one embodiment, the invention features a double stranded oligonucleotide construct having Formula DFO-II(a):
5′-p-XX′-3′
3′-X′X-p-5′
wherein each X and X′ are independently oligonucleotides of length about 12 nucleotides to about 21 nucleotides, wherein X comprises a nucleic acid sequence, for example of length about 12 to about 21 nucleotides (e.g., about 12, 13, 14, 15, 16, 17, 18, 19, 20 or 21 nucleotides), X′ comprises a nucleic acid sequence, for example of length about 12 to about 21 nucleotides (e.g., about 12, 13, 14, 15, 16, 17, 18, 19, 20 or 21 nucleotides) having nucleotide sequence complementarity to sequence X or a portion thereof, p comprises a terminal phosphate group that can be present or absent, and wherein X comprises nucleotide sequence that is complementary to a target nucleic acid sequence or a portion thereof (e.g., VEGF and/or VEGFR RNA target) and is of length sufficient to interact (e.g., base pair) with the target nucleic acid sequence (e.g., VEGF and/or VEGFR RNA) or a portion thereof. In one embodiment, the lengths of oligonucleotides X and X′ are identical. In another embodiment, the lengths of oligonucleotides X and X′ are not identical. In one embodiment, the lengths of the oligonucleotides X and X′ are sufficint to form a relatively stable double stranded oligonucleotide. In one embodiment, the double stranded oligonucleotide construct of Formula II(a) includes one or more, specifically 1, 2, 3 or 4, mismatches, to the extent such mismatches do not significantly diminish the ability of the double stranded oligonucleotide to inhibit target gene expression.

[0353] In one embodiment, the invention features a DFO molecule having Formula DFO-I(b):
5′-p-Z-3′
where Z comprises a palindromic or repeat nucleic acid sequence optionally including one or more non-standard or modified nucleotides (e.g., nucleotide with a modified base, such as 2-amino purine or a universal base) that can facilitate base-pairing with other nucleotides. Z can be, for example, of length sufficient to interact (e.g., base pair) with nucleotide sequence of a target nucleic acid (e.g., VEGF and/or VEGFR RNA) molecule, preferably of length of at least 12 nucleotides, specifically about 12 to about 24 nucleotides (e.g., about 12, 14, 16, 18, 20, 22 or 24 nucleotides). p represents a terminal phosphate group that can be present or absent.

[0354] In one embodiment, a DFO molecule having any of Formula DFO-I, DFO-I(a), DFO-I(b), DFO-II(a) or DFO-II can comprise chemical modifications as described herein without limitation, such as, for example, nucleotides having any of Formulae I-VII, stabilization chemistries as described in Table IV, or any other combination of modified nucleotides and non-nucleotides as described in the various embodiments herein.

[0355] In one embodiment, the palidrome or repeat sequence or modified nucleotide (e.g., nucleotide with a modified base, such as 2-amino purine or a universal base) in Z of DFO constructs having Formula DFO-I, DFO-I(a) and DFO-I(b), comprises chemically modified nucleotides that are able to interact with a portion of the target nucleic acid sequence (e.g., modified base analogs that can form Watson Crick base pairs or non-Watson Crick base pairs).

[0356] In one embodiment, a DFO molecule of the invention, for example a DFO having Formula DFO-I or DFO-II, comprises about 15 to about 40 nucleotides (e.g., about 15, 16, 17, 18, 19, 20, 21, 22, 23, 24, 25, 26, 27, 28, 29, 30, 31, 32, 33, 34, 35, 36, 37, 38, 39, or 40 nucleotides). In one embodiment, a DFO molecule of the invention comprises one or more chemical modifications. In a non-limiting example, the introduction of chemically modified nucleotides and/or non-nucleotides into nucleic acid molecules of the invention provides a powerful tool in overcoming potential limitations of in vivo stability and bioavailability inherent to unmodified RNA molecules that are delivered exogenously. For example, the use of chemically modified nucleic acid molecules can enable a lower dose of a particular nucleic acid molecule for a given therapeutic effect since chemically modified nucleic acid molecules tend to have a longer half-life in serum or in cells or tissues. Furthermore, certain chemical modifications can improve the bioavailability and/or potency of nucleic acid molecules by not only enhancing half-life but also facilitating the targeting of nucleic acid molecules to particular organs, cells or tissues and/or improving cellular uptake of the nucleic acid molecules. Therefore, even if the activity of a chemically modified nucleic acid molecule is reduced in vitro as compared to a native/unmodified nucleic acid molecule, for example when compared to an unmodified RNA molecule, the overall activity of the modified nucleic acid molecule can be greater than the native or unmodified nucleic acid molecule due to improved stability, potency, duration of effect, bioavailability and/or delivery of the molecule.

Multifunctional or Multi-Targeted siNA Molecules of the Invention

[0357] In one embodiment, the invention features siNA molecules comprising multifunctional short interfering nucleic acid (multifunctional siNA) molecules that modulate the expression of one or more genes in a biologic system, such as a cell, tissue, or organism. The multifunctional short interfering nucleic acid (multifunctional siNA) molecules of the invention can target more than one region a VEGF and/or VEGFR target nucleic acid sequence or can target sequences of more than one distinct target nucleic acid molecules (e.g., VEGF, VEGFR, interleukin (e.g., IL-4, IL-13), or interleukin receptor (e.g., IL-4R, IL-13R)RNA targets). The multifunctional siNA molecules of the invention can be chemically synthesized or expressed from transcription units and/or vectors. The multifunctional siNA molecules of the instant invention provide useful reagents and methods for a variety of human applications, therapeutic, diagnostic, agricultural, veterinary, target validation, genomic discovery, genetic engineering and pharmacogenomic applications.

[0358] Applicant demonstrates herein that certain oligonucleotides, refered to herein for convenience but not limitation as multifunctional short interfering nucleic acid or multifunctional siNA molecules, are potent mediators of sequence specific regulation of gene expression. The multifunctional siNA molecules of the invention are distinct from other nucleic acid sequences known in the art (e.g., siRNA, miRNA, stRNA, shRNA, antisense oligonucleotides, etc.) in that they represent a class of polynucleotide molecules that are designed such that each strand in the multifunctional siNA construct comprises a nucleotide sequence that is complementary to a distinct nucleic acid sequence in one or more target nucleic acid molecules. A single multifunctional siNA molecule (generally a double-stranded molecule) of the invention can thus target more than one (e.g., 2, 3, 4, 5, or more) differing target nucleic acid target molecules. Nucleic acid molecules of the invention can also target more than one (e.g., 2, 3, 4, 5, or more) region of the same target nucleic acid sequence. As such multifunctional siNA molecules of the invention are useful in down regulating or inhibiting the expression of one or more target nucleic acid molecules. For example, a multifunctional siNA molecule of the invention can target nucleic acid molecules encoding a cytokine and its corresponding receptor(s) (e.g., VEGF and VEGF receptors and interleukins (e.g., IL-4, IL-13) and interleukin receptors (e.g., IL-4R, IL-13R) described herein). By reducing or inhibiting expression of more than one target nucleic acid molecule with one multifunctional siNA construct, multifunctional siNA molecules of the invention represent a class of potent therapeutic agents that can provide simultaneous inhibition of multiple targets within a disease or pathogen related pathway. Such simultaneous inhibition can provide synergistic therapeutic treatment strategies without the need for separate preclinical and clinical development efforts or complex regulatory approval process.

[0359] Use of multifunctional siNA molecules that target more then one region of a target nucleic acid molecule (e.g., messenger RNA) is expected to provide potent inhibition of gene expression. For example, a single multifunctional siNA construct of the invention can target both conserved and variable regions of a target nucleic acid molecule (e.g., VEGF and/or VEGFR RNA and/or interleukin and/or interleukin receptor RNA), thereby allowing down regulation or inhibition of different splice variants encoded by a single gene, or allowing for targeting of both coding and non-coding regions of a target nucleic acid molecule.

[0360] Generally, double stranded oligonucleotides are formed by the assembly of two distinct oligonucleotides where the oligonucleotide sequence of one strand is complementary to the oligonucleotide sequence of the second strand; such double stranded oligonucleotides are generally assembled from two separate oligonucleotides (e.g., siRNA). Alternately, a duplex can be formed from a single molecule that folds on itself (e.g., shRNA or short hairpin RNA). These double stranded oligonucleotides are known in the art to mediate RNA interference and all have a common feature wherein only one nucleotide sequence region (guide sequence or the antisense sequence) has complementarity to a target nucleic acid sequence (e.g., VEGF and/or VEGFR RNA and/or interleukin and/or interleukin receptor RNA) and the other strand (sense sequence) comprises nucleotide sequence that is homologous to the target nucleic acid sequence. Generally, the antisense sequence is retained in the active RISC complex and guides the RISC to the target nucleotide sequence by means of complementary base-pairing of the antisense sequence with the target seqeunce for mediating sequence-specific RNA interference. It is known in the art that in some cell culture systems, certain types of unmodified siRNAs can exhibit “off target” effects. It is hypothesized that this off-target effect involves the participation of the sense sequence instead of the antisense sequence of the siRNA in the RISC complex (see for example Schwarz et al., 2003, Cell, 115, 199-208). In this instance the sense sequence is believed to direct the RISC complex to a sequence (off-target sequence) that is distinct from the intended target sequence, resulting in the inhibition of the off-target sequence. In these double stranded nucleic acid molecules, each strand is complementary to a distinct target nucleic acid sequence. However, the off-targets that are affected by these dsRNAs are not entirely predictable and are non-specific.

[0361] Distinct from the double stranded nucleic acid molecules known in the art, the applicants have developed a novel, potentially cost effective and simplified method of down regulating or inhibiting the expression of more than one target nucleic acid sequence using a single multifunctional siNA construct. The multifunctional siNA molecules of the invention are designed to be double-stranded or partially double stranded, such that a portion of each strand or region of the multifunctional siNA is complementary to a target nucleic acid sequence of choice. As such, the multifunctional siNA molecules of the invention are not limited to targeting sequences that are complementary to each other, but rather to any two differing target nucleic acid sequences. Multifunctional siNA molecules of the invention are designed such that each strand or region of the multifunctional siNA molecule, that is complementary to a given target nucleic acid sequence, is of suitable length (e.g., from about 16 to about 28 nucleotides in length, preferably from about 18 to about 28 nucleotides in length) for mediating RNA interference against the target nucleic acid sequence. The complementarity between the target nucleic acid sequence and a strand or region of the multifunctional siNA must be sufficient (at least about 8 base pairs) for cleavage of the target nucleic acid sequence by RNA interference. multifunctional siNA of the invention is expected to minimize off-target effects seen with certain siRNA sequences, such as those described in (Schwarz et al., supra).

[0362] It has been reported that dsRNAs of length between 29 base pairs and 36 base pairs (Tuschl et al., International PCT Publication No. WO 02/44321) do not mediate RNAi. One reason these dsRNAs are inactive may be the lack of turnover or dissociation of the strand that interacts with the target RNA sequence, such that the RISC complex is not able to efficiently interact with multiple copies of the target RNA resulting in a significant decrease in the potency and efficiency of the RNAi process. Applicant has surprisingly found that the multifunctional siNAs of the invention can overcome this hurdle and are capable of enhancing the efficiency and potency of RNAi process. As such, in certain embodiments of the invention, multifunctional siNAs of length of about 29 to about 36 base pairs can be designed such that, a portion of each strand of the multifunctional siNA molecule comprises a nucleotide sequence region that is complementary to a target nucleic acid of length sufficient to mediate RNAi efficiently (e.g., about 15 to about 23 base pairs) and a nucleotide sequence region that is not complementary to the target nucleic acid. By having both complementary and non-complementary portions in each strand of the multifunctional siNA, the multifunctional siNA can mediate RNA interference against a target nucleic acid sequence without being prohibitive to turnover or dissociation (e.g., where the length of each strand is too long to mediate RNAi against the respective target nucleic acid sequence). Furthermore, design of multifunctional siNA molecules of the invention with internal overlapping regions allows the multifunctional siNA molecules to be of favorable (decreased) size for mediating RNA interference and of size that is well suited for use as a therapeutic agent (e.g., wherein each strand is independently from about 18 to about 28 nucleotides in length). Non-limiting examples are illustrated in the enclosed FIGS. 16-21 and 42.

[0363] In one embodiment, a multifunctional siNA molecule of the invention comprises a first region and a second region, where the first region of the multifunctional siNA comprises a nucleotide sequence complementary to a nucleic acid sequence of a first target nucleic acid molecule, and the second region of the multifunctional siNA comprises nucleic acid sequence complementary to a nucleic acid sequence of a second target nucleic acid molecule. In one embodiment, a multifunctional siNA molecule of the invention comprises a first region and a second region, where the first region of the multifunctional siNA comprises nucleotide sequence complementary to a nucleic acid sequence of the first region of a target nucleic acid molecule, and the second region of the multifunctional siNA comprises nucleotide sequence complementary to a nucleic acid sequence of a second region of a the target nucleic acid molecule. In another embodiment, the first region and second region of the multifunctional siNA can comprise separate nucleic acid sequences that share some degree of complementarity (e.g., from about 1 to about 10 complementary nucleotides). In certain embodiments, multifunctional siNA constructs comprising separate nucleic acid seqeunces can be readily linked post-synthetically by methods and reagents known in the art and such linked constructs are within the scope of the invention. Alternately, the first region and second region of the multifunctional siNA can comprise a single nucleic acid sequence having some degree of self complementarity, such as in a hairpin or stem-loop structure. Non-limiting examples of such double stranded and hairpin multifunctional short interfering nucleic acids are illustrated in FIGS. 16 and 17 respectively. These multifunctional short interfering nucleic acids (multifunctional siNAs) can optionally include certain overlapping nucleotide sequence where such overlapping nucleotide sequence is present in between the first region and the second region of the multifunctional siNA (see for example FIGS. 18 and 19).

[0364] In one embodiment, the invention features a multifunctional short interfering nucleic acid (multifunctional siNA) molecule, wherein each strand of the the multifunctional siNA independently comprises a first region of nucleic acid sequence that is complementary to a distinct target nucleic acid sequence and the second region of nucleotide sequence that is not complementary to the target sequence. The target nucleic acid sequence of each strand is in the same target nucleic acid molecule or different target nucleic acid molecules.

[0365] In another embodiment, the multifunctional siNA comprises two strands, where: (a) the first strand comprises a region having sequence complementarity to a target nucleic acid sequence (complementary region 1) and a region having no sequence complementarity to the target nucleotide sequence (non-complementary region 1); (b) the second strand of the multifunction siNA comprises a region having sequence complementarity to a target nucleic acid sequence that is distinct from the target nucleotide sequence complementary to the first strand nucleotide sequence (complementary region 2), and a region having no sequence complementarity to the target nucleotide sequence of complementary region 2 (non-complementary region 2); (c) the complementary region 1 of the first strand comprises a nucleotide sequence that is complementary to a nucleotide sequence in the non-complementary region 2 of the second strand and the complementary region 2 of the second strand comprises a nucleotide sequence that is complementary to a nucleotide sequence in the non-complementary region 1 of the first strand. The target nucleic acid sequence of complementary region 1 and complementary region 2 is in the same target nucleic acid molecule or different target nucleic acid molecules.

[0366] In another embodiment, the multifunctional siNA comprises two strands, where: (a) the first strand comprises a region having sequence complementarity to a target nucleic acid sequence derived from a gene (e.g., VEGF, VEGFR, interleukin, and/or interleukin receptor gene) (complementary region 1) and a region having no sequence complementarity to the target nucleotide sequence of complementary region 1 (non-complementary region 1); (b) the second strand of the multifunction siNA comprises a region having sequence complementarity to a target nucleic acid sequence derived from a gene that is distinct from the gene of complementary region 1 (complementary region 2), and a region having no sequence complementarity to the target nucleotide sequence of complementary region 2 (non-complementary region 2); (c) the complementary region 1 of the first strand comprises a nucleotide sequence that is complementary to a nucleotide sequence in the non-complementary region 2 of the second strand and the complementary region 2 of the second strand comprises a nucleotide sequence that is complementary to a nucleotide sequence in the non-complementary region I of the first strand.

[0367] In another embodiment, the multifunctional siNA comprises two strands, where: (a) the first strand comprises a region having sequence complementarity to a target nucleic acid sequence derived from a gene (e.g., VEGF, VEGFR, interleukin, and/or interleukin receptor gene) (complementary region 1) and a region having no sequence complementarity to the target nucleotide sequence of complementary region 1 (non-complementary region 1); (b) the second strand of the multifunction siNA comprises a region having sequence complementarity to a target nucleic acid sequence distinct from the target nucleic acid sequence of complementary region 1 (complementary region 2), provided, however, that the target nucleic acid sequence for complementary region 1 and target nucleic acid sequence for complementary region 2 are both derived from the same gene, and a region having no sequence complementarity to the target nucleotide sequence of complementary region 2 (non-complementary region 2); (c) the complementary region 1 of the first strand comprises a nucleotide sequence that is complementary to a nucleotide sequence in the non-complementary region 2 of the second strand and the complementary region 2 of the second strand comprises a nucleotide sequence that is complementary to nucleotide sequence in the non-complementary region 1 of the first strand.

[0368] In one embodiment, the invention features a multifunctional short interfering nucleic acid (multifunctional siNA) molecule, wherein the multifunctional siNA comprises two complementary nucleic acid sequences in which the first sequence comprises a first region having nucleotide sequence complementary to nucleotide sequence within a target nucleic acid molecule, and in which the second seqeunce comprises a first region having nucleotide sequence complementary to a distinct nucleotide sequence within the same target nucleic acid molecule. Preferably, the first region of the first sequence is also complementary to the nucleotide sequence of the second region of the second sequence, and where the first region of the second sequence is complementary to the nucleotide sequence of the second region of the first sequence, In one embodiment, the invention features a multifunctional short interfering nucleic acid (multifunctional siNA) molecule, wherein the multifunctional siNA comprises two complementary nucleic acid sequences in which the first sequence comprises a first region having a nucleotide sequence complementary to a nucleotide sequence within a first target nucleic acid molecule, and in which the second seqeunce comprises a first region having a nucleotide sequence complementary to a distinct nucleotide sequence within a second target nucleic acid molecule. Preferably, the first region of the first sequence is also complementary to the nucleotide sequence of the second region of the second sequence, and where the first region of the second sequence is complementary to the nucleotide sequence of the second region of the first sequence,

[0369] In one embodiment, the invention features a multifunctional siNA molecule comprising a first region and a second region, where the first region comprises a nucleic acid sequence having about 18 to about 28 nucleotides complementary to a nucleic acid sequence within a first target nucleic acid molecule, and the second region comprises nucleotide sequence having about 18 to about 28 nucleotides complementary to a distinct nucleic acid sequence within a second target nucleic acid molecule.

[0370] In one embodiment, the invention features a multifunctional siNA molecule comprising a first region and a second region, where the first region comprises nucleic acid sequence having about 18 to about 28 nucleotides complementary to a nucleic acid sequence within a target nucleic acid molecule, and the second region comprises nucleotide sequence having about 18 to about 28 nucleotides complementary to a distinct nucleic acid sequence within the same target nucleic acid molecule.

[0371] In one embodiment, the invention features a double stranded multifunctional short interfering nucleic acid (multifunctional siNA) molecule, wherein one strand of the multifunctional siNA comprises a first region having nucleotide sequence complementary to a first target nucleic acid sequence, and the second strand comprises a first region having a nucleotide sequence complementary to a second target nucleic acid sequence. The first and second target nucleic acid sequences can be present in separate target nucleic acid molecules or can be different regions within the same target nucleic acid molecule. As such, multifunctional siNA molecules of the invention can be used to target the expression of different genes, splice variants of the same gene, both mutant and conserved regions of one or more gene transcripts, or both coding and non-coding sequences of the same or differeing genes or gene transcripts.

[0372] In one embodiment, a target nucleic acid molecule of the invention encodes a single protein. In another embodiment, a target nucleic acid molecule encodes more than one protein (e.g., 1, 2, 3, 4, 5 or more proteins). As such, a multifunctional siNA construct of the invention can be used to down regulate or inhibit the expression of several proteins. For example, a multifunctional siNA molecule comprising a region in one strand having nucleotide sequence complementarity to a first target nucleic acid sequence derived from a gene encoding one protein (e.g., a cytokine, such as vascular endothelial growth factor or VEGF) and the second strand comprising a region with nucleotide sequence complementarity to a second target nucleic acid sequence present in target nucleic acid molecules derived from genes encoding two proteins (e.g., two differing receptors, such as VEGF receptor I and VEGF receptor 2, for a single cytokine, such as VEGF) can be used to down regulate, inhibit, or shut down a particular biologic pathway by targeting, for example, a cytokine and receptors for the cytokine, or a ligand and receptors for the ligand.

[0373] In one embodiment the invention takes advantage of conserved nucleotide sequences present in different isoforms of cytokines or ligands and receptors for the cytokines or ligands. By designing multifunctional siNAs in a manner where one strand includes a sequence that is complementary to a target nucleic acid sequence conserved among various isoforms of a cytokine and the other strand includes sequence that is complementary to a target nucleic acid sequence conserved among the receptors for the cytokine, it is possible to selectively and effectively modulate or inhibit a biological pathway or multiple genes in a biological pathway using a single multifunctional siNA.

[0374] In another nonlimiting example, a multifunctional siNA molecule comprising a region in one strand having a nucleotide sequence complementarity to a first target nucleic acid sequence present in target nucleic acid molecules encoding two proteins (e.g., two isoforms of a cytokine such as VEGF, inlcuding for example any of VEGF-A, VEGF-B, VEGF-C, and/or VEGF-D) and the second strand comprising a region with a nucleotide sequence complementarity to a second target nucleic acid sequence present in target nucleotide molecules encoding two additional proteins (e.g., two differing receptors for the cytokine, such as VEGFR1, VEGFR2, and/or VEGFR3) can be used to down regulate, inhibit, or shut down a particular biologic pathway by targeting different isoforms of a cytokine and receptors for such cytokines.

[0375] In one embodiment, a multifunctional short interfering nucleic acid (multifunctional siNA) of the invention comprises a region in each strand, wherein the region in one strand comprises nucleotide sequence complementary to a cytokine and the region in the second strand comprises nucleotide sequence complementary to a corresponding receptor for the cytokine. Non-limiting examples of cytokines include vascular endothelial growth factors (e.g., VEGF-A, VEGF-B, VEGF-C, VEGF-D) and/or interleukins (e.g., IL-4, IL-13) and non-limiting examples of cytokine receptors include VEGFR1, VEGFR2, and VEGFR3 and/or IL-4 and IL-13R.

[0376] In one embodiment, a double stranded multifunctional siNA molecule of the invention comprises a structure having Formula MF-I:
5′-p-XZX′-3′
3′-Y′ZY-p-5′
wherein each 5′-p-XZX′-3′ and 5′-p-YZY′-3′ are independently an oligonucleotide of length of about 20 nucleotides to about 300 nucleotides, preferably of about 20 to about 200 nucleotides, about 20 to about 100 nucleotides, about 20 to about 40 nucleotides, about 20 to about 40 nucleotides, about 24 to about 38 nucleotides, or about 26 to about 38 nucleotides; XZ comprises a nucleic acid sequence that is complementary to a first target nucleic acid sequence; YZ is an oligonucleotide comprising nucleic acid sequence that is complementary to a second target nucleic acid sequence; Z comprises nucleotide sequence of length about 1 to about 24 nucleotides (e.g., about 1, 2, 3, 4, 5, 6, 7, 8, 9, 10, 11, 12, 13, 14, 15, 16, 17, 18, 19, 20, 21, 22, 23, or 24 nucleotides) that is self complimentary; X comprises nucleotide sequence of length about 1 to about 100 nucleotides, preferably about 1 to about 21 nucleotides (e.g., about 1, 2, 3, 4, 5, 6, 7, 8, 9, 10, 11, 12, 13, 14, 15, 16, 17, 18, 19, 20, or 21 nucleotides) that is complementary to nucleotide sequence present in region Y′; Y comprises nucleotide sequence of length about 1 to about 100 nucleotides, prefereably about 1- about 21 nucleotides (e.g., about 1, 2, 3, 4, 5, 6, 7, 8, 9, 10, 11, 12, 13, 14, 15, 16, 17, 18, 19, 20 or 21 nucleotides) that is complementary to nucleotide sequence present in region X′; each p comprises a terminal phosphate group that is independently present or absent; each XZ and YZ is independently of length sufficient to stably interact (i.e., base pair) with the first and second target nucleic acid sequence, respectively, or a portion thereof. For example, each sequence X and Y can independently comprise sequence from about 12 to about 21 or more nucleotides in length (e.g., about 12, 13, 14, 15, 16, 17, 18, 19, 20, 21, or more) that is complementary to a target nucleotide sequence in different target nucleic acid molecules, such as target RNAs or a portion thereof. In another non-limiting example, the length of the nucleotide sequence of X and Z together that is complementary to the first target nucleic acid sequence or a portion thereof is from about 12 to about 21 or more nucleotides (e.g., about 12, 13, 14, 15, 16, 17, 18, 19, 20, 21, or more). In another non-limiting example, the length of the nucleotide sequence of Y and Z together, that is complementary to the second target nucleic acid sequence or a portion thereof is from about 12 to about 21 or more nucleotides (e.g., about 12, 13, 14, 15, 16, 17, 18, 19, 20, 21, or more). In one embodiment, the first target nucleic acid sequence and the second target nucleic acid sequence are present in the same target nucleic acid molecule (e.g., VEGF and/or VEGFR RNA). In another embodiment, the first target nucleic acid sequence and the second target nucleic acid sequence are present in different target nucleic acid molecules (e.g., VEGF, VEGFR, interleukin, and/or interleukin receptor RNA). In one embodiment, Z comprises a palindrome or a repeat sequence. In one embodiment, the lengths of oligonucleotides X and X′ are identical. In another embodiment, the lengths of oligonucleotides X and X′ are not identical. In one embodiment, the lengths of oligonucleotides Y and Y′ are identical. In another embodiment, the lengths of oligonucleotides Y and Y′ are not identical. In one embodiment, the double stranded oligonucleotide construct of Formula I(a) includes one or more, specifically 1, 2, 3 or 4, mismatches, to the extent such mismatches do not significantly diminish the ability of the double stranded oligonucleotide to inhibit target gene expression.

[0377] In one embodiment, a multifunctional siNA molecule of the invention comprises a structure having Formula MF-II:
5′-p-XX′-3′
3′-Y′Y-p-5′
wherein each 5′-p-XX′-3′ and 5′-p-YY′-3′ are independently an oligonucleotide of length of about 20 nucleotides to about 300 nucleotides, preferably about 20 to about 200 nucleotides, about 20 to about 100 nucleotides, about 20 to about 40 nucleotides, about 20 to about 40 nucleotides, about 24 to about 38 nucleotides, or about 26 to about 38 nucleotides; X comprises a nucleic acid sequence that is complementary to a first target nucleic acid sequence; Y is an oligonucleotide comprising nucleic acid sequence that is complementary to a second target nucleic acid sequence; X comprises a nucleotide sequence of length about 1 to about 100 nucleotides, preferably about 1 to about 21 nucleotides (e.g., about 1, 2, 3, 4, 5, 6, 7, 8, 9, 10, 11, 12, 13, 14, 15, 16, 17, 18, 19, 20, or 21 nucleotides) that is complementary to nucleotide sequence present in region Y′; Y comprises nucleotide sequence of length about 1 to about 100 nucleotides, prefereably about 1 to about 21 nucleotides (e.g., about 1, 2, 3, 4, 5, 6, 7, 8, 9, 10, 11, 12, 13, 14, 15, 16, 17, 18, 19, 20 or 21 nucleotides) that is complementary to nucleotide sequence present in region X′; each p comprises a terminal phosphate group that is independently present or absent; each X and Y independently is of length sufficient to stably interact (i.e., base pair) with the first and second target nucleic acid sequence, respectively, or a portion thereof. For example, each sequence X and Y can independently comprise sequence from about 12 to about 21 or more nucleotides in length (e.g., about 12, 13, 14, 15, 16, 17, 18, 19, 20, 21, or more) that is complementary to a target nucleotide sequence in different target nucleic acid molecules, such as VEGF, VEGFR, interluekin and/or interleukin receptor target RNAs or a portion thereof. In one embodiment, the first target nucleic acid sequence and the second target nucleic acid sequence are present in the same target nucleic acid molecule (e.g., VEGF and/or VEGFR RNA). In another embodiment, the first target nucleic acid sequence and the second target nucleic acid sequence are present in different target nucleic acid molecules (e.g., VEGF, VEGFR, interleukin, and/or interleukin receptor RNA). In one embodiment, Z comprises a palindrome or a repeat sequence. In one embodiment, the lengths of oligonucleotides X and X′ are identical. In another embodiment, the lengths of oligonucleotides X and X′ are not identical. In one embodiment, the lengths of oligonucleotides Y and Y′ are identical. In another embodiment, the lengths of oligonucleotides Y and Y′ are not identical. In one embodiment, the double stranded oligonucleotide construct of Formula I(a) includes one or more, specifically 1, 2, 3 or 4, mismatches, to the extent such mismatches do not significantly diminish the ability of the double stranded oligonucleotide to inhibit target gene expression.

[0378] In one embodiment, a multifunctional siNA molecule of the invention comprises a structure having Formula MF-III:

$$\begin{matrix}X & {X}^{′} \\ {Y}^{′} - W - Y & \end{matrix}$$

wherein each X, X′, Y, and Y′ is independently an oligonucleotide of length of about 15 nucleotides to about 50 nucleotides, preferably about 18 to about 40 nucleotides, or about 19 to about 23 nucleotides; X comprises nucleotide sequence that is complementary to nucleotide sequence present in region Y′; X′ comprises nucleotide sequence that is complementary to nucleotide sequence present in region Y; each X and X′ is independently of length sufficient to stably interact (i.e., base pair) with a first and a second target nucleic acid sequence, respectively, or a portion thereof; W represents a nucleotide or non-nucleotide linker that connects sequences Y′ and Y; and the multifunctional siNA directs cleavage of the first and second target sequence via RNA interference. In one embodiment, the first target nucleic acid sequence and the second target nucleic acid sequence are present in the same target nucleic acid molecule (e.g., VEGF and/or VEGFR RNA). In another embodiment, the first target nucleic acid sequence and the second target nucleic acid sequence are present in different target nucleic acid molecules (e.g., VEGF, VEGFR, interleukin, and/or interleukin receptor RNA). In one embodiment, region W connects the 3′-end of sequence Y′ with the 3′-end of sequence Y. In one embodiment, region W connects the 3′-end of sequence Y′ with the 5′-end of sequence Y. In one embodiment, region W connects the 5′-end of sequence Y′ with the 5′-end of sequence Y. In one embodiment, region W connects the 5′-end of sequence Y′ with the 3′-end of sequence Y. In one embodiment, a terminal phosphate group is present at the 5′-end of sequence X. In one embodiment, a terminal phosphate group is present at the 5′-end of sequence X′. In one embodiment, a terminal phosphate group is present at the 5′-end of sequence Y. In one embodiment, a terminal phosphate group is present at the 5′-end of sequence Y′. In one embodiment, W connects sequences Y and Y′ via a biodegradable linker. In one embodiment, W further comprises a conjugate, lable, aptamer, ligand, lipid, or polymer.

[0379] In one embodiment, a multifunctional siNA molecule of the invention comprises a structure having Formula MF-IV:

$$\begin{matrix}X & {X}^{′} \\ {Y}^{′} - W - Y & \end{matrix}$$

wherein each X, X′, Y, and Y′ is independently an oligonucleotide of length of about 15 nucleotides to about 50 nucleotides, preferably about 18 to about 40 nucleotides, or about 19 to about 23 nucleotides; X comprises nucleotide sequence that is complementary to nucleotide sequence present in region Y′; X′ comprises nucleotide sequence that is complementary to nucleotide sequence present in region Y; each Y and Y′ is independently of length sufficient to stably interact (i.e., base pair) with a first and a second target nucleic acid sequence, respectively, or a portion thereof; W represents a nucleotide or non-nucleotide linker that connects sequences Y′ and Y; and the multifunctional siNA directs cleavage of the first and second target sequence via RNA interference. In one embodiment, the first target nucleic acid sequence and the second target nucleic acid sequence are present in the same target nucleic acid molecule (e.g., VEGF and/or VEGFR RNA). In another embodiment, the first target nucleic acid sequence and the second target nucleic acid sequence are present in different target nucleic acid molecules (e.g., VEGF, VEGFR, interleukin, and/or interleukin receptor RNA). In one embodiment, region W connects the 3′-end of sequence Y′ with the 3′-end of sequence Y. In one embodiment, region W connects the 3′-end of sequence Y′ with the 5′-end of sequence Y. In one embodiment, region W connects the 5′-end of sequence Y′ with the 5′-end of sequence Y. In one embodiment, region W connects the 5′-end of sequence Y′ with the 3′-end of sequence Y. In one embodiment, a terminal phosphate group is present at the 5′-end of sequence X. In one embodiment, a terminal phosphate group is present at the 5′-end of sequence X′. In one embodiment, a terminal phosphate group is present at the 5′-end of sequence Y. In one embodiment, a terminal phosphate group is present at the 5′-end of sequence Y′. In one embodiment, W connects sequences Y and Y′ via a biodegradable linker. In one embodiment, W further comprises a conjugate, lable, aptamer, ligand, lipid, or polymer.

[0380] In one embodiment, a multifunctional siNA molecule of the invention comprises a structure having Formula MF-V:

$$\begin{matrix}X & {X}^{′} \\ {Y}^{′} - W - Y & \end{matrix}$$

wherein each X, X′, Y, and Y′ is independently an oligonucleotide of length of about 15 nucleotides to about 50 nucleotides, preferably about 18 to about 40 nucleotides, or about 19 to about 23 nucleotides; X comprises nucleotide sequence that is complementary to nucleotide sequence present in region Y′; X′ comprises nucleotide sequence that is complementary to nucleotide sequence present in region Y; each X, X′, Y, or Y′ is independently of length sufficient to stably interact (i.e., base pair) with a first, second, third, or fourth target nucleic acid sequence, respectively, or a portion thereof; W represents a nucleotide or non-nucleotide linker that connects sequences Y′ and Y; and the multifunctional siNA directs cleavage of the first, second, third, and/or fourth target sequence via RNA interference. In one embodiment, the first, second, third and fourth target nucleic acid sequence are all present in the same target nucleic acid molecule (e.g., VEGF and/or VEGFR RNA). In another embodiment, the first, second, third and fourth target nucleic acid sequence are independently present in different target nucleic acid molecules (e.g., VEGF, VEGFR, interleukin, and/or interleukin receptor RNA). In one embodiment, region W connects the 3′-end of sequence Y′ with the 3′-end of sequence Y. In one embodiment, region W connects the 3′-end of sequence Y′ with the 5′-end of sequence Y. In one embodiment, region W connects the 5′-end of sequence Y′ with the 5′-end of sequence Y. In one embodiment, region W connects the 5′-end of sequence Y′ with the 3′-end of sequence Y. In one embodiment, a terminal phosphate group is present at the 5′-end of sequence X. In one embodiment, a terminal phosphate group is present at the 5′-end of sequence X′. In one embodiment, a terminal phosphate group is present at the 5′-end of sequence Y. In one embodiment, a terminal phosphate group is present at the 5′-end of sequence Y′. In one embodiment, W connects sequences Y and Y′ via a biodegradable linker. In one embodiment, W further comprises a conjugate, lable, aptamer, ligand, lipid, or polymer.

[0381] In one embodiment, regions X and Y of multifunctional siNA molecule of the invention (e.g., having any of Formula MF-I-MF-V), are complementary to different target nucleic acid sequences that are portions of the same target nucleic acid molecule. In one embodiment, such target nucleic acid sequences are at different locations within the coding region of a RNA transcript. In one embodiment, such target nucleic acid sequences comprise coding and non-coding regions of the same RNA transcript. In one embodiment, such target nucleic acid sequences comprise regions of alternately spliced transcripts or precursors of such alternately spliced transcripts.

[0382] In one embodiment, a multifunctional siNA molecule having any of Formula MF-I-MF-V can comprise chemical modifications as described herein without limitation, such as, for example, nucleotides having any of Formulae I-VII described herein, stabilization chemistries as described in Table IV, or any other combination of modified nucleotides and non-nucleotides as described in the various embodiments herein.

[0383] In one embodiment, the palidrome or repeat sequence or modified nucleotide (e.g., nucleotide with a modified base, such as 2-amino purine or a universal base) in Z of multifunctional siNA constructs having Formula MF-I or MF-II comprises chemically modified nucleotides that are able to interact with a portion of the target nucleic acid sequence (e.g., modified base analogs that can form Watson Crick base pairs or non-Watson Crick base pairs).

[0384] In one embodiment, a multifunctional siNA molecule of the invention, for example each strand of a multifunctional siNA having MF-I-MF-V, independently comprises about 15 to about 40 nucleotides (e.g., about 15, 16, 17, 18, 19, 20, 21, 22, 23, 24, 25, 26, 27, 28, 29, 30, 31, 32, 33, 34, 35, 36, 37, 38, 39, or 40 nucleotides). In one embodiment, a multifunctional siNA molecule of the invention comprises one or more chemical modifications. In a non-limiting example, the introduction of chemically modified nucleotides and/or non-nucleotides into nucleic acid molecules of the invention provides a powerful tool in overcoming potential limitations of in vivo stability and bioavailability inherent to unmodified RNA molecules that are delivered exogenously. For example, the use of chemically modified nucleic acid molecules can enable a lower dose of a particular nucleic acid molecule for a given therapeutic effect since chemically modified nucleic acid molecules tend to have a longer half-life in serum or in cells or tissues. Furthermore, certain chemical modifications can improve the bioavailability and/or potency of nucleic acid molecules by not only enhancing half-life but also facilitating the targeting of nucleic acid molecules to particular organs, cells or tissues and/or improving cellular uptake of the nucleic acid molecules. Therefore, even if the activity of a chemically modified nucleic acid molecule is reduced in vitro as compared to a native/unmodified nucleic acid molecule, for example when compared to an unmodified RNA molecule, the overall activity of the modified nucleic acid molecule can be greater than the native or unmodified nucleic acid molecule due to improved stability, potency, duration of effect, bioavailability and/or delivery of the molecule.

[0385] In another embodiment, the invention features multifunctional siNAs, wherein the multifunctional siNAs are assembled from two separate double-stranded siNAs, with one of the ends of each sense strand is tethered to the end of the sense strand of the other siNA molecule, such that the two antisense siNA strands are annealed to their corresponding sense strand that are tethered to each other at one end (see FIG. 43). The tethers or linkers can be nucleotide-based linkers or non-nucleotide based linkers as generally known in the art and as described herein.

[0386] In one embodiment, the invention features a multifunctional siNA, wherein the multifunctional siNA is assembled from two separate double-stranded siNAs, with the 5′-end of one sense strand of the siNA is tethered to the 5′-end of the sense strand of the other siNA molecule, such that the 5′-ends of the two antisense siNA strands, annealed to their corresponding sense strand that are tethered to each other at one end, point away (in the opposite direction) from each other (see FIG. 43(A)). The tethers or linkers can be nucleotide-based linkers or non-nucleotide based linkers as generally known in the art and as described herein.

[0387] In one embodiment, the invention features a multifunctional siNA, wherein the multifunctional siNA is assembled from two separate double-stranded siNAs, with the 3′-end of one sense strand of the siNA is tethered to the 3′-end of the sense strand of the other siNA molecule, such that the 5′-ends of the two antisense siNA strands, annealed to their corresponding sense strand that are tethered to each other at one end, face each other (see FIG. 43(B)). The tethers or linkers can be nucleotide-based linkers or non-nucleotide based linkers as generally known in the art and as described herein.

[0388] In one embodiment, the invention features a multifunctional siNA, wherein the multifunctional siNA is assembled from two separate double-stranded siNAs, with the 5′-end of one sense strand of the siNA is tethered to the 3′-end of the sense strand of the other siNA molecule, such that the 5′-end of the one of the antisense siNA strands annealed to their corresponding sense strand that are tethered to each other at one end, faces the 3′-end of the other antisense strand (see FIG. 43 (C-D)). The tethers or linkers can be nucleotide-based linkers or non-nucleotide based linkers as generally known in the art and as described herein.

[0389] In one embodiment, the invention features a multifunctional siNA, wherein the multifunctional siNA is assembled from two separate double-stranded siNAs, with the 5′-end of one antisense strand of the siNA is tethered to the 3′-end of the antisense strand of the other siNA molecule, such that the 5′-end of the one of the sense siNA strands annealed to their corresponding antisense sense strand that are tethered to each other at one end, faces the 3′-end of the other sense strand (see FIG. 43 (G-H)). In one embodiment, the linkage between the 5′-end of the first antisense strand and the 3′-end of the second antisense strand is designed in such a way as to be readily cleavable (e.g., biodegradable linker) such that the 5′end of each antisense strand of the multifunctional siNA has a free 5′-end suitable to mediate RNA interefence-based cleavage of the target RNA. The tethers or linkers can be nucleotide-based linkers or non-nucleotide based linkers as generally known in the art and as described herein.

[0390] In one embodiment, the invention features a multifunctional siNA, wherein the multifunctional siNA is assembled from two separate double-stranded siNAs, with the 5′-end of one antisense strand of the siNA is tethered to the 5′-end of the antisense strand of the other siNA molecule, such that the 3′-end of the one of the sense siNA strands annealed to their corresponding antisense sense strand that are tethered to each other at one end, faces the 3′-end of the other sense strand (see FIG. 43(E)). In one embodiment, the linkage between the 5′-end of the first antisense strand and the 5′-end of the second antisense strand is designed in such a way as to be readily cleavable (e.g., biodegradable linker) such that the 5′end of each antisense strand of the multifunctional siNA has a free 5′-end suitable to mediate RNA interefence-based cleavage of the target RNA. The tethers or linkers can be nucleotide-based linkers or non-nucleotide based linkers as generally known in the art and as described herein.

[0391] In one embodiment, the invention features a multifunctional siNA, wherein the multifunctional siNA is assembled from two separate double-stranded siNAs, with the 3′-end of one antisense strand of the siNA is tethered to the 3′-end of the antisense strand of the other siNA molecule, such that the 5′-end of the one of the sense siNA strands annealed to their corresponding antisense sense strand that are tethered to each other at one end, faces the 3′-end of the other sense strand (see FIG. 43(F)). In one embodiment, the linkage between the 5′-end of the first antisense strand and the 5′-end of the second antisense strand is designed in such a way as to be readily cleavable (e.g., biodegradable linker) such that the 5′end of each antisense strand of the multifunctional siNA has a free 5′-end suitable to mediate RNA interefence-based cleavage of the target RNA. The tethers or linkers can be nucleotide-based linkers or non-nucleotide based linkers as generally known in the art and as described herein.

[0392] In any of the above embodiments, a first target nucleic acid sequence or second target nucleic acid sequence can independently comprise VEGF, VEGFR, interleukin, and/or interleukin receptor RNA or a portion thereof. In one embodiment, the first target nucleic acid sequence is a VEGF (e.g., any of VEGF-A, VEGF-B, VEGF-C, and/or VEGF-D) RNA or a portion thereof and the second target nucleic acid sequence is a VEGFR (e.g., any of VEGFR1, VEGFR2, and/or VEGFR3) RNA of a portion thereof. In one embodiment, the first target nucleic acid sequence is a VEGFR (e.g., any of VEGFR1, VEGFR2, and/or VEGFR3) RNA or a portion thereof and the second target nucleic acid sequence is a VEGF (e.g., any of VEGF-A, VEGF-B, VEGF-C, and/or VEGF-D) RNA or a portion thereof. In one embodiment, the first target nucleic acid sequence is a VEGF (e.g., any of VEGF-A, VEGF-B, VEGF-C, and/or VEGF-D) RNA or a portion thereof and the second target nucleic acid sequence is a VEGF (e.g., any of VEGF-A, VEGF-B, VEGF-C, and/or VEGF-D) RNA or a portion thereof. In one embodiment, the first target nucleic acid sequence is a VEGFR (e.g., any of VEGFR1, VEGFR2, and/or VEGFR3) RNA or a portion thereof and the second target nucleic acid sequence is a VEGFR (e.g., any of VEGFR1, VEGFR2, and/or VEGFR3) RNA or a portion thereof. In one embodiment, the first target nucleic acid sequence is a VEGF (e.g., any of VEGF-A, VEGF-B, VEGF-C, and/or VEGF-D) RNA or a portion thereof and the second target nucleic acid sequence is a interleukin (e.g., any of IL-1, IL-2, IL-3, IL-4, IL-5, IL-6, IL-7, IL-8, IL-9, IL-10, IL-11, IL-12, IL-13, IL-14, IL-15, IL-16, IL-17, IL-18, IL-19, IL-20, IL-21, IL-22, IL-23, IL-24, IL-25, IL-26, and IL-27) RNA or a portion thereof. In one embodiment, the first target nucleic acid sequence is a VEGFR (e.g., any of VEGFR1, VEGFR2, and/or VEGFR3) RNA or a portion thereof and the second target nucleic acid sequence is a interleukin receptor (e.g., any of IL-1R, IL-2R, IL-3R, IL-4R, IL-5R, IL-6R, IL-7R, IL-8R, IL-9R, IL-10R, IL-11R, IL-12R, IL-13R, IL-14R, IL-15R, IL-16R, IL-17R, IL-18R, IL-19R, IL-20R, IL-21R, IL-22R, IL-23R, IL-24R, IL-25R, IL-26R, and IL-27R)RNA or a portion thereof. In one embodiment, the first target nucleic acid sequence is a VEGF (e.g., any of VEGF-A, VEGF-B, VEGF-C, and/or VEGF-D) and VEGFR (e.g., any of VEGFR1, VEGFR2, and/or VEGFR3) RNA or a portion thereof having sequence homology and the second target nucleic acid sequence is a interleukin receptor (e.g., any of IL-1R, IL-2R, IL-3R, IL-4R, IL-5R, IL-6R, IL-7R, IL-8R, IL-9R, IL-10R, IL-11R, IL-12R, IL-13R, IL-14R, IL-15R, IL-16R, IL-17R, IL-18R, IL-19R, IL-20R, IL-21R, IL-22R, IL-23R, IL-24R, IL-25R, IL-26R, and IL-27R)RNA or a portion thereof.

Synthesis of Nucleic Acid Molecules

[0393] Synthesis of nucleic acids greater than 100 nucleotides in length is difficult using automated methods, and the therapeutic cost of such molecules is prohibitive. In this invention, small nucleic acid motifs (“small” refers to nucleic acid motifs no more than 100 nucleotides in length, preferably no more than 80 nucleotides in length, and most preferably no more than 50 nucleotides in length; e.g., individual siNA oligonucleotide sequences or siNA sequences synthesized in tandem) are preferably used for exogenous delivery. The simple structure of these molecules increases the ability of the nucleic acid to invade targeted regions of protein and/or RNA structure. Exemplary molecules of the instant invention are chemically synthesized, and others can similarly be synthesized.

[0394] Oligonucleotides (e.g., certain modified oligonucleotides or portions of oligonucleotides lacking ribonucleotides) are synthesized using protocols known in the art, for example as described in Caruthers et al., 1992, Methods in Enzymology 211, 3-19, Thompson et al., International PCT Publication No. WO 99/54459, Wincott et al., 1995, Nucleic Acids Res. 23, 2677-2684, Wincott et al., 1997, Methods Mol. Bio., 74, 59, Brennan et al., 1998, Biotechnol Bioeng., 61, 33-45, and Brennan, U.S. Pat. No. 6,001,311. All of these references are incorporated herein by reference. The synthesis of oligonucleotides makes use of common nucleic acid protecting and coupling groups, such as dimethoxytrityl at the 5′-end, and phosphoramidites at the 3′-end. In a non-limiting example, small scale syntheses are conducted on a 394 Applied Biosystems, Inc. synthesizer using a 0.2 μmol scale protocol with a 2.5 min coupling step for 2′-O-methylated nucleotides and a 45 second coupling step for 2′-deoxy nucleotides or 2′-deoxy-2′-fluoro nucleotides. Table V outlines the amounts and the contact times of the reagents used in the synthesis cycle. Alternatively, syntheses at the 0.2 μmol scale can be performed on a 96-well plate synthesizer, such as the instrument produced by Protogene (Palo Alto, Calif.) with minimal modification to the cycle. A 33-fold excess (60 μL of 0.11 M=6.6 μmol) of 2′-O-methyl phosphoramidite and a 105-fold excess of S-ethyl tetrazole (60 μL of 0.25 M=15 μmol) can be used in each coupling cycle of 2′-O-methyl residues relative to polymer-bound 5′-hydroxyl. A 22-fold excess (40 μL of 0.11 M=4.4 μmol) of deoxy phosphoramidite and a 70-fold excess of S-ethyl tetrazole (40 μL of 0.25 M=10 μmol) can be used in each coupling cycle of deoxy residues relative to polymer-bound 5′-hydroxyl. Average coupling yields on the 394 Applied Biosystems, Inc. synthesizer, determined by colorimetric quantitation of the trityl fractions, are typically 97.5-99%. Other oligonucleotide synthesis reagents for the 394 Applied Biosystems, Inc. synthesizer include the following: detritylation solution is 3% TCA in methylene chloride (ABI); capping is performed with 16% N-methyl imidazole in THF (ABI) and 10% acetic anhydride/10% 2,6-lutidine in THF (ABI); and oxidation solution is 16.9 mM 12, 49 mM pyridine, 9% water in THF (PerSeptive Biosystems, Inc.). Burdick & Jackson Synthesis Grade acetonitrile is used directly from the reagent bottle. S-Ethyltetrazole solution (0.25 M in acetonitrile) is made up from the solid obtained from American International Chemical, Inc. Alternately, for the introduction of phosphorothioate linkages, Beaucage reagent (3H-1,2-Benzodithiol-3-one 1,1-dioxide, 0.05 M in acetonitrile) is used.

[0395] Deprotection of the DNA-based oligonucleotides is performed as follows: the polymer-bound trityl-on oligoribonucleotide is transferred to a 4 mL glass screw top vial and suspended in a solution of 40% aqueous methylamine (1 mL) at 65° C. for 10 minutes. After cooling to −20° C., the supernatant is removed from the polymer support. The support is washed three times with 1.0 mL of EtOH:MeCN:H₂O/3:1:1, vortexed and the supernatant is then added to the first supernatant. The combined supernatants, containing the oligoribonucleotide, are dried to a white powder.

[0396] The method of synthesis used for RNA including certain siNA molecules of the invention follows the procedure as described in Usman et al., 1987, J. Am. Chem. Soc., 109, 7845; Scaringe et al., 1990, Nucleic Acids Res., 18, 5433; and Wincott et al., 1995, Nucleic Acids Res. 23, 2677-2684 Wincott et al., 1997, Methods Mol. Bio., 74, 59, and makes use of common nucleic acid protecting and coupling groups, such as dimethoxytrityl at the 5′-end, and phosphoramidites at the 3′-end. In a non-limiting example, small scale syntheses are conducted on a 394 Applied Biosystems, Inc. synthesizer using a 0.2 μmol scale protocol with a 7.5 min coupling step for alkylsilyl protected nucleotides and a 2.5 min coupling step for 2′-O-methylated nucleotides. Table V outlines the amounts and the contact times of the reagents used in the synthesis cycle. Alternatively, syntheses at the 0.2 μmol scale can be done on a 96-well plate synthesizer, such as the instrument produced by Protogene (Palo Alto, Calif.) with minimal modification to the cycle. A 33-fold excess (60 μL of 0.11 M=6.6 μmol) of 2′-O-methyl phosphoramidite and a 75-fold excess of S-ethyl tetrazole (60 μL of 0.25 M=15 μmol) can be used in each coupling cycle of 2′-O-methyl residues relative to polymer-bound 5′-hydroxyl. A 66-fold excess (120 μL of 0.11 M=13.2 μmol) of alkylsilyl (ribo) protected phosphoramidite and a 150-fold excess of S-ethyl tetrazole (120 μL of 0.25 M=30 μmol) can be used in each coupling cycle of ribo residues relative to polymer-bound 5′-hydroxyl. Average coupling yields on the 394 Applied Biosystems, Inc. synthesizer, determined by colorimetric quantitation of the trityl fractions, are typically 97.5-99%. Other oligonucleotide synthesis reagents for the 394 Applied Biosystems, Inc. synthesizer include the following: detritylation solution is 3% TCA in methylene chloride (ABI); capping is performed with 16% N-methyl imidazole in THF (ABI) and 10% acetic anhydride/10% 2,6-lutidine in THF (ABI); oxidation solution is 16.9 mM 12, 49 mM pyridine, 9% water in THF (PerSeptive Biosystems, Inc.). Burdick & Jackson Synthesis Grade acetonitrile is used directly from the reagent bottle. S-Ethyltetrazole solution (0.25 M in acetonitrile) is made up from the solid obtained from American International Chemical, Inc. Alternately, for the introduction of phosphorothioate linkages, Beaucage reagent (3H-1,2-Benzodithiol-3-one 1,1-dioxide0.05 M in acetonitrile) is used.

[0397] Deprotection of the RNA is performed using either a two-pot or one-pot protocol. For the two-pot protocol, the polymer-bound trityl-on oligoribonucleotide is transferred to a 4 mL glass screw top vial and suspended in a solution of 40% aq. methylamine (1 mL) at 65° C. for 10 min. After cooling to −20° C., the supernatant is removed from the polymer support. The support is washed three times with 1.0 mL of EtOH:MeCN:H2O/3:1:1, vortexed and the supernatant is then added to the first supernatant. The combined supernatants, containing the oligoribonucleotide, are dried to a white powder. The base deprotected oligoribonucleotide is resuspended in anhydrous TEA/HF/NMP solution (300 μL of a solution of 1.5 mL N-methylpyrrolidinone, 750 μL TEA and 1 mL TEA-3HF to provide a 1.4 M HF concentration) and heated to 65° C. After 1.5 h, the oligomer is quenched with 1.5 M NH₄HCO₃.

[0398] Alternatively, for the one-pot protocol, the polymer-bound trityl-on oligoribonucleotide is transferred to a 4 mL glass screw top vial and suspended in a solution of 33% ethanolic methylamine/DMSO: 1/1 (0.8 mL) at 65° C. for 15 minutes. The vial is brought to room temperature TEA-3HF (0.1 mL) is added and the vial is heated at 65° C. for 15 minutes. The sample is cooled at −20° C. and then quenched with 1.5 M NH₄HCO₃.

[0399] For purification of the trityl-on oligomers, the quenched NH₄HCO₃ solution is loaded onto a C-18 containing cartridge that had been prewashed with acetonitrile followed by 50 mM TEAA. After washing the loaded cartridge with water, the RNA is detritylated with 0.5% TFA for 13 minutes. The cartridge is then washed again with water, salt exchanged with 1 M NaCl and washed with water again. The oligonucleotide is then eluted with 30% acetonitrile.

[0400] The average stepwise coupling yields are typically >98% (Wincott et al., 1995 Nucleic Acids Res. 23, 2677-2684). Those of ordinary skill in the art will recognize that the scale of synthesis can be adapted to be larger or smaller than the example described above including but not limited to 96-well format.

[0401] Alternatively, the nucleic acid molecules of the present invention can be synthesized separately and joined together post-synthetically, for example, by ligation (Moore et al., 1992, Science 256, 9923; Draper et al., International PCT publication No. WO 93/23569; Shabarova et al., 1991, Nucleic Acids Research 19, 4247; Bellon et al., 1997, Nucleosides & Nucleotides, 16, 951; Bellon et al., 1997, Bioconjugate Chem. 8, 204), or by hybridization following synthesis and/or deprotection.

[0402] The siNA molecules of the invention can also be synthesized via a tandem synthesis methodology as described in Example 1 herein, wherein both siNA strands are synthesized as a single contiguous oligonucleotide fragment or strand separated by a cleavable linker which is subsequently cleaved to provide separate siNA fragments or strands that hybridize and permit purification of the siNA duplex. The linker can be a polynucleotide linker or a non-nucleotide linker. The tandem synthesis of siNA as described herein can be readily adapted to both multiwell/multiplate synthesis platforms such as 96 well or similarly larger multi-well platforms. The tandem synthesis of siNA as described herein can also be readily adapted to large scale synthesis platforms employing batch reactors, synthesis columns and the like.

[0403] A siNA molecule can also be assembled from two distinct nucleic acid strands or fragments wherein one fragment includes the sense region and the second fragment includes the antisense region of the RNA molecule.

[0404] The nucleic acid molecules of the present invention can be modified extensively to enhance stability by modification with nuclease resistant groups, for example, 2′-amino, 2′-C-allyl, 2′-fluoro, 2′-O-methyl, 2′-H (for a review see Usman and Cedergren, 1992, TIBS 17, 34; Usman et al., 1994, Nucleic Acids Symp. Ser. 31, 163). siNA constructs can be purified by gel electrophoresis using general methods or can be purified by high pressure liquid chromatography (HPLC; see Wincott et al., supra, the totality of which is hereby incorporated herein by reference) and re-suspended in water.

[0405] In another aspect of the invention, siNA molecules of the invention are expressed from transcription units inserted into DNA or RNA vectors. The recombinant vectors can be DNA plasmids or viral vectors. siNA expressing viral vectors can be constructed based on, but not limited to, adeno-associated virus, retrovirus, adenovirus, or alphavirus. The recombinant vectors capable of expressing the siNA molecules can be delivered as described herein, and persist in target cells. Alternatively, viral vectors can be used that provide for transient expression of siNA molecules.

Optimizing Activity of the Nucleic Acid Molecule of the Invention.

[0406] Chemically synthesizing nucleic acid molecules with modifications (base, sugar and/or phosphate) can prevent their degradation by serum ribonucleases, which can increase their potency (see e.g., Eckstein et al., International Publication No. WO 92/07065; Perrault et al., 1990 Nature 344, 565; Pieken et al., 1991, Science 253, 314; Usman and Cedergren, 1992, Trends in Biochem. Sci. 17, 334; Usman et al., International Publication No. WO 93/15187; and Rossi et al., International Publication No. WO 91/03162; Sproat, U.S. Pat. No. 5,334,711; Gold et al., U.S. Pat. No. 6,300,074; and Burgin et al., supra; all of which are incorporated by reference herein). All of the above references describe various chemical modifications that can be made to the base, phosphate and/or sugar moieties of the nucleic acid molecules described herein. Modifications that enhance their efficacy in cells, and removal of bases from nucleic acid molecules to shorten oligonucleotide synthesis times and reduce chemical requirements are desired.

[0407] There are several examples in the art describing sugar, base and phosphate modifications that can be introduced into nucleic acid molecules with significant enhancement in their nuclease stability and efficacy. For example, oligonucleotides are modified to enhance stability and/or enhance biological activity by modification with nuclease resistant groups, for example, 2′-amino, 2′-C-allyl, 2′-fluoro, 2′-O-methyl, 2′-O-allyl, 2′-H, nucleotide base modifications (for a review see Usman and Cedergren, 1992, TIBS. 17, 34; Usman et al., 1994, Nucleic Acids Symp. Ser. 31, 163; Burgin et al., 1996, Biochemistry, 35, 14090). Sugar modification of nucleic acid molecules have been extensively described in the art (see Eckstein et al., International Publication PCT No. WO 92/07065; Perrault et al. Nature, 1990, 344, 565-568; Pieken et al. Science, 1991, 253, 314-317; Usman and Cedergren, Trends in Biochem. Sci., 1992, 17, 334-339; Usman et al. International Publication PCT No. WO 93/15187; Sproat, U.S. Pat. No. 5,334,711 and Beigelman et al., 1995, J. Biol. Chem., 270, 25702; Beigelman et al., International PCT publication No. WO 97/26270; Beigelman et al., U.S. Pat. No. 5,716,824; Usman et al., U.S. Pat. No. 5,627,053; Woolf et al., International PCT Publication No. WO 98/13526; Thompson et al., U.S. Ser. No. 60/082,404 which was filed on Apr. 20, 1998; Karpeisky et al., 1998, Tetrahedron Lett., 39, 1131; Earnshaw and Gait, 1998, Biopolymers (Nucleic Acid Sciences), 48, 39-55; Verma and Eckstein, 1998, Annu. Rev. Biochem., 67, 99-134; and Burlina et al., 1997, Bioorg. Med. Chem., 5, 1999-2010; all of the references are hereby incorporated in their totality by reference herein). Such publications describe general methods and strategies to determine the location of incorporation of sugar, base and/or phosphate modifications and the like into nucleic acid molecules without modulating catalysis, and are incorporated by reference herein. In view of such teachings, similar modifications can be used as described herein to modify the siNA nucleic acid molecules of the instant invention so long as the ability of siNA to promote RNAi is cells is not significantly inhibited.

[0408] While chemical modification of oligonucleotide internucleotide linkages with phosphorothioate, phosphorodithioate, and/or 5′-methylphosphonate linkages improves stability, excessive modifications can cause some toxicity or decreased activity. Therefore, when designing nucleic acid molecules, the amount of these internucleotide linkages should be minimized. The reduction in the concentration of these linkages should lower toxicity, resulting in increased efficacy and higher specificity of these molecules.

[0409] Short interfering nucleic acid (siNA) molecules having chemical modifications that maintain or enhance activity are provided. Such a nucleic acid is also generally more resistant to nucleases than an unmodified nucleic acid. Accordingly, the in vitro and/or in vivo activity should not be significantly lowered. In cases in which modulation is the goal, therapeutic nucleic acid molecules delivered exogenously should optimally be stable within cells until translation of the target RNA has been modulated long enough to reduce the levels of the undesirable protein. This period of time varies between hours to days depending upon the disease state. Improvements in the chemical synthesis of RNA and DNA (Wincott et al., 1995, Nucleic Acids Res. 23, 2677; Caruthers et al., 1992, Methods in Enzymology 211, 3-19 (incorporated by reference herein)) have expanded the ability to modify nucleic acid molecules by introducing nucleotide modifications to enhance their nuclease stability, as described above.

[0410] In one embodiment, nucleic acid molecules of the invention include one or more (e.g., about 1, 2, 3, 4, 5, 6, 7, 8, 9, 10, or more) G-clamp nucleotides. A G-clamp nucleotide is a modified cytosine analog wherein the modifications confer the ability to hydrogen bond both Watson-Crick and Hoogsteen faces of a complementary guanine within a duplex, see for example Lin and Matteucci, 1998, J. Am. Chem. Soc., 120, 8531-8532. A single G-clamp analog substitution within an oligonucleotide can result in substantially enhanced helical thermal stability and mismatch discrimination when hybridized to complementary oligonucleotides. The inclusion of such nucleotides in nucleic acid molecules of the invention results in both enhanced affinity and specificity to nucleic acid targets, complementary sequences, or template strands. In another embodiment, nucleic acid molecules of the invention include one or more (e.g., about 1, 2, 3, 4, 5, 6, 7, 8, 9, 10, or more) LNA “locked nucleic acid” nucleotides such as a 2′,4′-C methylene bicyclo nucleotide (see for example Wengel et al., International PCT Publication No. WO 00/66604 and WO 99/14226).

[0411] In another embodiment, the invention features conjugates and/or complexes of siNA molecules of the invention. Such conjugates and/or complexes can be used to facilitate delivery of siNA molecules into a biological system, such as a cell. The conjugates and complexes provided by the instant invention can impart therapeutic activity by transferring therapeutic compounds across cellular membranes, altering the pharmacokinetics, and/or modulating the localization of nucleic acid molecules of the invention. The present invention encompasses the design and synthesis of novel conjugates and complexes for the delivery of molecules, including, but not limited to, small molecules, lipids, cholesterol, phospholipids, nucleosides, nucleotides, nucleic acids, antibodies, toxins, negatively charged polymers and other polymers, for example proteins, peptides, hormones, carbohydrates, polyethylene glycols, or polyamines, across cellular membranes. In general, the transporters described are designed to be used either individually or as part of a multi-component system, with or without degradable linkers. These compounds are expected to improve delivery and/or localization of nucleic acid molecules of the invention into a number of cell types originating from different tissues, in the presence or absence of serum (see Sullenger and Cech, U.S. Pat. No. 5,854,038). Conjugates of the molecules described herein can be attached to biologically active molecules via linkers that are biodegradable, such as biodegradable nucleic acid linker molecules.

[0412] The term “biodegradable linker” as used herein, refers to a nucleic acid or non-nucleic acid linker molecule that is designed as a biodegradable linker to connect one molecule to another molecule, for example, a biologically active molecule to a siNA molecule of the invention or the sense and antisense strands of a siNA molecule of the invention. The biodegradable linker is designed such that its stability can be modulated for a particular purpose, such as delivery to a particular tissue or cell type. The stability of a nucleic acid-based biodegradable linker molecule can be modulated by using various chemistries, for example combinations of ribonucleotides, deoxyribonucleotides, and chemically-modified nucleotides, such as 2′-O-methyl, 2′-fluoro, 2′-amino, 2′-O-amino, 2′-C-allyl, 2′-O-allyl, and other 2′-modified or base modified nucleotides. The biodegradable nucleic acid linker molecule can be a dimer, trimer, tetramer or longer nucleic acid molecule, for example, an oligonucleotide of about 2, 3, 4, 5, 6, 7, 8, 9, 10, 11, 12, 13, 14, 15, 16, 17, 18, 19, or 20 nucleotides in length, or can comprise a single nucleotide with a phosphorus-based linkage, for example, a phosphoramidate or phosphodiester linkage. The biodegradable nucleic acid linker molecule can also comprise nucleic acid backbone, nucleic acid sugar, or nucleic acid base modifications.

[0413] The term “biodegradable” as used herein, refers to degradation in a biological system, for example, enzymatic degradation or chemical degradation.

[0414] The term “biologically active molecule” as used herein refers to compounds or molecules that are capable of eliciting or modifying a biological response in a system. Non-limiting examples of biologically active siNA molecules either alone or in combination with other molecules contemplated by the instant invention include therapeutically active molecules such as antibodies, cholesterol, hormones, antivirals, peptides, proteins, chemotherapeutics, small molecules, vitamins, co-factors, nucleosides, nucleotides, oligonucleotides, enzymatic nucleic acids, antisense nucleic acids, triplex forming oligonucleotides, 2,5-A chimeras, siNA, dsRNA, allozymes, aptamers, decoys and analogs thereof. Biologically active molecules of the invention also include molecules capable of modulating the pharmacokinetics and/or pharmacodynamics of other biologically active molecules, for example, lipids and polymers such as polyamines, polyamides, polyethylene glycol and other polyethers.

[0415] The term “phospholipid” as used herein, refers to a hydrophobic molecule comprising at least one phosphorus group. For example, a phospholipid can comprise a phosphorus-containing group and saturated or unsaturated alkyl group, optionally substituted with OH, COOH, oxo, amine, or substituted or unsubstituted aryl groups.

[0416] Therapeutic nucleic acid molecules (e.g., siNA molecules) delivered exogenously optimally are stable within cells until reverse transcription of the RNA has been modulated long enough to reduce the levels of the RNA transcript. The nucleic acid molecules are resistant to nucleases in order to function as effective intracellular therapeutic agents. Improvements in the chemical synthesis of nucleic acid molecules described in the instant invention and in the art have expanded the ability to modify nucleic acid molecules by introducing nucleotide modifications to enhance their nuclease stability as described above.

[0417] In yet another embodiment, siNA molecules having chemical modifications that maintain or enhance enzymatic activity of proteins involved in RNAi are provided. Such nucleic acids are also generally more resistant to nucleases than unmodified nucleic acids. Thus, in vitro and/or in vivo the activity should not be significantly lowered.

[0418] Use of the nucleic acid-based molecules of the invention will lead to better treatments by affording the possibility of combination therapies (e.g., multiple siNA molecules targeted to different genes; nucleic acid molecules coupled with known small molecule modulators; or intermittent treatment with combinations of molecules, including different motifs and/or other chemical or biological molecules). The treatment of subjects with siNA molecules can also include combinations of different types of nucleic acid molecules, such as enzymatic nucleic acid molecules (ribozymes), allozymes, antisense, 2,5-A oligoadenylate, decoys, and aptamers.

[0419] In another aspect a siNA molecule of the invention comprises one or more 5′ and/or a 3′-cap structure, for example, on only the sense siNA strand, the antisense siNA strand, or both siNA strands.

[0420] By “cap structure” is meant chemical modifications, which have been incorporated at either terminus of the oligonucleotide (see, for example, Adamic et al., U.S. Pat. No. 5,998,203, incorporated by reference herein). These terminal modifications protect the nucleic acid molecule from exonuclease degradation, and may help in delivery and/or localization within a cell. The cap may be present at the 5′-terminus (5′-cap) or at the 3′-terminal (3′-cap) or may be present on both termini. In non-limiting examples, the 5′-cap includes, but is not limited to, glyceryl, inverted deoxy abasic residue (moiety); 4′,5′-methylene nucleotide; 1-(beta-D-erythrofuranosyl) nucleotide, 4′-thio nucleotide; carbocyclic nucleotide; 1,5-anhydrohexitol nucleotide; L-nucleotides; alpha-nucleotides; modified base nucleotide; phosphorodithioate linkage; threo-pentofuranosyl nucleotide; acyclic 3′,4′-seco nucleotide; acyclic 3,4-dihydroxybutyl nucleotide; acyclic 3,5-dihydroxypentyl nucleotide, 3′-3′-inverted nucleotide moiety; 3′-3′-inverted abasic moiety; 3′-2′-inverted nucleotide moiety; 3′-2′-inverted abasic moiety; 1,4-butanediol phosphate; 3′-phosphoramidate; hexylphosphate; aminohexyl phosphate; 3′-phosphate; 3′-phosphorothioate; phosphorodithioate; or bridging or non-bridging methylphosphonate moiety. Non-limiting examples of cap moieties are shown in FIG. 10.

[0421] Non-limiting examples of the 3′-cap include, but are not limited to, glyceryl, inverted deoxy abasic residue (moiety), 4′,5′-methylene nucleotide; 1-(beta-D-erythrofuranosyl) nucleotide; 4′-thio nucleotide, carbocyclic nucleotide; 5′-amino-alkyl phosphate; 1,3-diamino-2-propyl phosphate; 3-aminopropyl phosphate; 6-aminohexyl phosphate; 1,2-aminododecyl phosphate; hydroxypropyl phosphate; 1,5-anhydrohexitol nucleotide; L-nucleotide; alpha-nucleotide; modified base nucleotide; phosphorodithioate; threo-pentofuranosyl nucleotide; acyclic 3′,4′-seco nucleotide; 3,4-dihydroxybutyl nucleotide; 3,5-dihydroxypentyl nucleotide, 5′-5′-inverted nucleotide moiety; 5′-5′-inverted abasic moiety; 5′-phosphoramidate; 5′-phosphorothioate; 1,4-butanediol phosphate; 5′-amino; bridging and/or non-bridging 5′-phosphoramidate, phosphorothioate and/or phosphorodithioate, bridging or non bridging methylphosphonate and 5′-mercapto moieties (for more details see Beaucage and Iyer, 1993, Tetrahedron 49, 1925; incorporated by reference herein).

[0422] By the term “non-nucleotide” is meant any group or compound which can be incorporated into a nucleic acid chain in the place of one or more nucleotide units, including either sugar and/or phosphate substitutions, and allows the remaining bases to exhibit their enzymatic activity. The group or compound is abasic in that it does not contain a commonly recognized nucleotide base, such as adenosine, guanine, cytosine, uracil or thymine and therefore lacks a base at the 1′-position.

[0423] An “alkyl” group refers to a saturated aliphatic hydrocarbon, including straight-chain, branched-chain, and cyclic alkyl groups. Preferably, the alkyl group has 1 to 12 carbons. More preferably, it is a lower alkyl of from 1 to 7 carbons, more preferably 1 to 4 carbons. The alkyl group can be substituted or unsubstituted. When substituted the substituted group(s) is preferably, hydroxyl, cyano, alkoxy, ═O, ═S, NO₂ or N(CH₃)₂, amino, or SH. The term also includes alkenyl groups that are unsaturated hydrocarbon groups containing at least one carbon-carbon double bond, including straight-chain, branched-chain, and cyclic groups. Preferably, the alkenyl group has 1 to 12 carbons. More preferably, it is a lower alkenyl of from 1 to 7 carbons, more preferably 1 to 4 carbons. The alkenyl group may be substituted or unsubstituted. When substituted the substituted group(s) is preferably, hydroxyl, cyano, alkoxy, ═O, ═S, NO₂, halogen, N(CH₃)₂, amino, or SH. The term “alkyl” also includes alkynyl groups that have an unsaturated hydrocarbon group containing at least one carbon-carbon triple bond, including straight-chain, branched-chain, and cyclic groups. Preferably, the alkynyl group has 1 to 12 carbons. More preferably, it is a lower alkynyl of from 1 to 7 carbons, more preferably 1 to 4 carbons. The alkynyl group may be substituted or unsubstituted. When substituted the substituted group(s) is preferably, hydroxyl, cyano, alkoxy, ═O, ═S, NO₂ or N(CH₃)₂, amino or SH.

[0424] Such alkyl groups can also include aryl, alkylaryl, carbocyclic aryl, heterocyclic aryl, amide and ester groups. An “aryl” group refers to an aromatic group that has at least one ring having a conjugated pi electron system and includes carbocyclic aryl, heterocyclic aryl and biaryl groups, all of which may be optionally substituted. The preferred substituent(s) of aryl groups are halogen, trihalomethyl, hydroxyl, SH, OH, cyano, alkoxy, alkyl, alkenyl, alkynyl, and amino groups. An “alkylaryl” group refers to an alkyl group (as described above) covalently joined to an aryl group (as described above). Carbocyclic aryl groups are groups wherein the ring atoms on the aromatic ring are all carbon atoms. The carbon atoms are optionally substituted. Heterocyclic aryl groups are groups having from 1 to 3 heteroatoms as ring atoms in the aromatic ring and the remainder of the ring atoms are carbon atoms. Suitable heteroatoms include oxygen, sulfur, and nitrogen, and include furanyl, thienyl, pyridyl, pyrrolyl, N-lower alkyl pyrrolo, pyrimidyl, pyrazinyl, imidazolyl and the like, all optionally substituted. An “amide” refers to an —C(O)—NH—R, where R is either alkyl, aryl, alkylaryl or hydrogen. An “ester” refers to an —C(O)—OR′, where R is either alkyl, aryl, alkylaryl or hydrogen.

[0425] By “nucleotide” as used herein is as recognized in the art to include natural bases (standard), and modified bases well known in the art. Such bases are generally located at the 1′ position of a nucleotide sugar moiety. Nucleotides generally comprise a base, sugar and a phosphate group. The nucleotides can be unmodified or modified at the sugar, phosphate and/or base moiety, (also referred to interchangeably as nucleotide analogs, modified nucleotides, non-natural nucleotides, non-standard nucleotides and other; see, for example, Usman and McSwiggen, supra; Eckstein et al., International PCT Publication No. WO 92/07065; Usman et al., International PCT Publication No. WO 93/15187; Uhlman & Peyman, supra, all are hereby incorporated by reference herein). There are several examples of modified nucleic acid bases known in the art as summarized by Limbach et al., 1994, Nucleic Acids Res. 22, 2183. Some of the non-limiting examples of base modifications that can be introduced into nucleic acid molecules include, inosine, purine, pyridin-4-one, pyridin-2-one, phenyl, pseudouracil, 2, 4, 6-trimethoxy benzene, 3-methyl uracil, dihydrouridine, naphthyl, aminophenyl, 5-alkylcytidines (e.g., 5-methylcytidine), 5-alkyluridines (e.g., ribothymidine), 5-halouridine (e.g., 5-bromouridine) or 6-azapyrimidines or 6-alkylpyrimidines (e.g. 6-methyluridine), propyne, and others (Burgin et al., 1996, Biochemistry, 35, 14090; Uhlman & Peyman, supra). By “modified bases” in this aspect is meant nucleotide bases other than adenine, guanine, cytosine and uracil at 1′ position or their equivalents.

[0426] In one embodiment, the invention features modified siNA molecules, with phosphate backbone modifications comprising one or more phosphorothioate, phosphorodithioate, methylphosphonate, phosphotriester, morpholino, amidate carbamate, carboxymethyl, acetamidate, polyamide, sulfonate, sulfonamide, sulfamate, formacetal, thioformacetal, and/or alkylsilyl, substitutions. For a review of oligonucleotide backbone modifications, see Hunziker and Leumann, 1995, Nucleic Acid Analogues: Synthesis and Properties, in Modern Synthetic Methods, VCH, 331-417, and Mesmaeker et al., 1994, Novel Backbone Replacements for Oligonucleotides, in Carbohydrate Modifications in Antisense Research, ACS, 24-39.

[0427] By “abasic” is meant sugar moieties lacking a base or having other chemical groups in place of a base at the 1′ position, see for example Adamic et al., U.S. Pat. No. 5,998,203.

[0428] By “unmodified nucleoside” is meant one of the bases adenine, cytosine, guanine, thymine, or uracil joined to the 1′ carbon of β-D-ribo-furanose.

[0429] By “modified nucleoside” is meant any nucleotide base which contains a modification in the chemical structure of an unmodified nucleotide base, sugar and/or phosphate. Non-limiting examples of modified nucleotides are shown by Formulae I-VII and/or other modifications described herein.

[0430] In connection with 2′-modified nucleotides as described for the present invention, by “amino” is meant 2′-NH₂ or 2′-O—NH₂, which can be modified or unmodified. Such modified groups are described, for example, in Eckstein et al., U.S. Pat. No. 5,672,695 and Matulic-Adamic et al., U.S. Pat. No. 6,248,878, which are both incorporated by reference in their entireties.

[0431] Various modifications to nucleic acid siNA structure can be made to enhance the utility of these molecules. Such modifications will enhance shelf-life, half-life in vitro, stability, and ease of introduction of such oligonucleotides to the target site, e.g., to enhance penetration of cellular membranes, and confer the ability to recognize and bind to targeted cells.

Administration of Nucleic Acid Molecules

[0432] A siNA molecule of the invention can be adapted for use to treat, prevent, inhibit, or reduce cancer, ocular, proliferative, respiratory, autoimmune, neurologic, allergic, or angiogenesis/neovascularization related diseases, conditions, or disorders, and/or any other trait, disease or condition that is related to or will respond to the levels of VEGF, VEGFR, interleukin, and/or interleukin receptor in a cell or tissue, alone or in combination with other therapies.

[0433] For example, a siNA molecule can comprise a delivery vehicle, including liposomes, for administration to a subject, carriers and diluents and their salts, and/or can be present in pharmaceutically acceptable formulations. Methods for the delivery of nucleic acid molecules are described in Akhtar et al., 1992, Trends Cell Bio., 2, 139; Delivery Strategies for Antisense Oligonucleotide Therapeutics, ed. Akhtar, 1995, Maurer et al., 1999, Mol. Membr. Biol., 16, 129-140; Hofland and Huang, 1999, Handb. Exp. Pharmacol., 137, 165-192; and Lee et al., 2000, ACS Symp. Ser., 752, 184-192, all of which are incorporated herein by reference. Beigelman et al., U.S. Pat. No. 6,395,713 and Sullivan et al., PCT WO 94/02595 further describe the general methods for delivery of nucleic acid molecules. These protocols can be utilized for the delivery of virtually any nucleic acid molecule. Nucleic acid molecules can be administered to cells by a variety of methods known to those of skill in the art, including, but not restricted to, encapsulation in liposomes, by iontophoresis, or by incorporation into other vehicles, such as biodegradable polymers, hydrogels, cyclodextrins (see for example Gonzalez et al., 1999, Bioconjugate Chem., 10, 1068-1074; Wang et al., International PCT publication Nos. WO 03/47518 and WO 03/46185), poly(lactic-co-glycolic)acid (PLGA) and PLCA microspheres (see for example U.S. Pat. No. 6,447,796 and U.S. Patent Application Publication No. U.S. 2002130430), biodegradable nanocapsules, and bioadhesive microspheres, or by proteinaceous vectors (O'Hare and Normand, International PCT Publication No. WO 00/53722). In another embodiment, the nucleic acid molecules of the invention can also be formulated or complexed with polyethyleneimine and derivatives thereof, such as polyethyleneimine-polyethyleneglycol-N-acetylgalactosamine (PEI-PEG-GAL) or polyethyleneimine-polyethyleneglycol-tri-N-acetylgalactosamine (PEI-PEG-triGAL) derivatives. In one embodiment, the nucleic acid molecules of the invention are formulated as described in U.S. Patent Application Publication No. 20030077829, incorporated by reference herein in its entirety.

[0434] In one embodiment, a siNA molecule of the invention is complexed with membrane disruptive agents such as those described in U.S. Patent Application Publication No. 20010007666, incorporated by reference herein in its entirety including the drawings. In another embodiment, the membrane disruptive agent or agents and the siNA molecule are also complexed with a cationic lipid or helper lipid molecule, such as those lipids described in U.S. Pat. No. 6,235,310, incorporated by reference herein in its entirety including the drawings.

[0435] In one embodiment, a siNA molecule of the invention is complexed with delivery systems as described in U.S. Patent Application Publication No. 2003077829 and International PCT Publication Nos. WO 00/03683 and WO 02/087541, all incorporated by reference herein in their entirety including the drawings.

[0436] In one embodiment, a compound, molecule, or composition for the treatment of ocular conditions (e.g., macular degeneration, diabetic retinopathy etc.) is administered to a subject intraocularly or by intraocular means. In another embodiment, a compound, molecule, or composition for the treatment of ocular conditions (e.g., macular degeneration, diabetic retinopathy etc.) is administered to a subject periocularly or by periocular means (see for example Ahlheim et al., International PCT publication No. WO 03/24420). In one embodiment, a siNA molecule and/or formulation or composition thereof is administered to a subject intraocularly or by intraocular means. In another embodiment, a siNA molecule and/or formualtion or composition thereof is administered to a subject periocularly or by periocular means. Periocular administration generally provides a less invasive approach to administering siNA molecules and formualtion or composition thereof to a subject (see for example Ahlheim et al., International PCT publication No. WO 03/24420). The use of periocular administraction also minimizes the risk of retinal detachment, allows for more frequent dosing or administraction, provides a clinically relevant route of administraction for macular degeneration and other optic conditions, and also provides the possiblilty of using resevoirs (e.g., implants, pumps or other devices) for drug delivery. In one embodiment, siNA compounds and compositions of the invention are administered locally, e.g., via intraocular or periocular means, such as injection, iontophoresis (see, for example, WO 03/043689 and WO 03/030989), or implant, about every 1-50 weeks (e.g., about every 1, 2, 3, 4, 5, 6, 7, 8, 9, 10, 11, 12, 13, 14, 15, 16, 17, 18, 19, 20, 21, 22, 23, 24, 25, 26, 27, 28, 29, 30, 31, 32, 33, 34, 35, 36, 37, 38, 39, 40, 41, 42, 43, 44, 45, 46, 47, 48, 49, or 50 weeks), alone or in combination with other comounds and/or therapeis herein. In one embodiment, siNA compounds and compositions of the invention are administered systemically (e.g., via intravenous, subcutaneous, intramuscular, infusion, pump, implant etc.) about every 1-50 weeks (e.g., about every 1, 2, 3, 4, 5, 6, 7, 8, 9, 10, 11, 12, 13, 14, 15, 16, 17, 18, 19, 20, 21, 22, 23, 24, 25, 26, 27, 28, 29, 30, 31, 32, 33, 34, 35, 36, 37, 38, 39, 40, 41, 42, 43, 44, 45, 46, 47, 48, 49, or 50 weeks), alone or in combination with other comounds and/or therapies described herein and/or otherwise known in the art.

[0437] In one embodiment, a siNA molecule of the invention is administered iontophoretically, for example to a particular organ or compartment (e.g., the eye, back of the eye, heart, liver, kidney, bladder, prostate, tumor, CNS etc.). Non-limiting examples of iontophoretic delivery are described in, for example, WO 03/043689 and WO 03/030989, which are incorporated by reference in their entireties herein.

[0438] In one embodiment, the siNA molecules of the invention and formulations or compositions thereof are administered to the liver as is generally known in the art (see for example Wen et al., 2004, World J Gastroenterol., 10, 244-9; Murao et al., 2002, Pharm Res., 19, 1808-14; Liu et al., 2003, Gene Ther., 10, 180-7; Hong et al., 2003, J Pharm Pharmacol., 54, 51-8; Herrmann et al., 2004, Arch Virol., 149, 1611-7; and Matsuno et al., 2003, Gene Ther., 10, 1559-66).

[0439] In one embodiment, the invention features the use of methods to deliver the nucleic acid molecules of the instant invention to hematopoietic cells, including monocytes and lymphocytes. These methods are described in detail by Hartmann et al., 1998, J. Phamacol. Exp. Ther., 285(2), 920-928; Kronenwett et al., 1998, Blood, 91(3), 852-862; Filion and Phillips, 1997, Biochim. Biophys. Acta., 1329(2), 345-356; Ma and Wei, 1996, Leuk. Res., 20(11/12), 925-930; and Bongartz et al., 1994, Nucleic Acids Research, 22(22), 4681-8. Such methods, as described above, include the use of free oligonucleitide, cationic lipid formulations, liposome formulations including pH sensitive liposomes and immunoliposomes, and bioconjugates including oligonucleotides conjugated to fusogenic peptides, for the transfection of hematopoietic cells with oligonucleotides.

[0440] In one embodiment, the siNA molecules of the invention and formulations or compositions thereof are administered to the central nervous system and/or peripheral nervous system. Experiments have demonstrated the efficient in vivo uptake of nucleic acids by neurons. As an example of local administration of nucleic acids to nerve cells, Sommer et al., 1998, Antisense Nuc. Acid Drug Dev., 8, 75, describe a study in which a 15mer phosphorothioate antisense nucleic acid molecule to c-fos is administered to rats via microinjection into the brain. Antisense molecules labeled with tetramethylrhodamine-isothiocyanate (TRITC) or fluorescein isothiocyanate (FITC) were taken up by exclusively by neurons thirty minutes post-injection. A diffuse cytoplasmic staining and nuclear staining was observed in these cells. As an example of systemic administration of nucleic acid to nerve cells, Epa et al., 2000, Antisense Nuc. Acid Drug Dev., 10, 469, describe an in vivo mouse study in which beta-cyclodextrin-adamantane-oligonucleotide conjugates were used to target the p75 neurotrophin receptor in neuronally differentiated PC12 cells. Following a two week course of IP administration, pronounced uptake of p75 neurotrophin receptor antisense was observed in dorsal root ganglion (DRG) cells. In addition, a marked and consistent down-regulation of p75 was observed in DRG neurons. Additional approaches to the targeting of nucleic acid to neurons are described in Broaddus et al., 1998, J. Neurosurg., 88(4), 734; Karle et al., 1997, Eur. J. Pharmocol., 340(2/3), 153; Bannai et al., 1998, Brain Research, 784(1,2), 304; Rajakumar et al., 1997, Synapse, 26(3), 199; Wu-pong et al., 1999, BioPharm, 12(1), 32; Bannai et al., 1998, Brain Res. Protoc., 3(1), 83; Simantov et al., 1996, Neuroscience, 74(1), 39. Nucleic acid molecules of the invention are therefore amenable to delivery to and uptake by cells that express repeat expansion allelic variants for modulation of RE gene expression. The delivery of nucleic acid molecules of the invention, targeting RE is provided by a variety of different strategies. Traditional approaches to CNS delivery that can be used include, but are not limited to, intrathecal and intracerebroventricular administration, implantation of catheters and pumps, direct injection or perfusion at the site of injury or lesion, injection into the brain arterial system, or by chemical or osmotic opening of the blood-brain barrier. Other approaches can include the use of various transport and carrier systems, for example though the use of conjugates and biodegradable polymers. Furthermore, gene therapy approaches, for example as described in Kaplitt et al., U.S. Pat. No. 6,180,613 and Davidson, WO 04/013280, can be used to express nucleic acid molecules in the CNS.

[0441] In one embodiment, the nucleic acid molecules of the invention are administered via pulmonary delivery, such as by inhalation of an aerosol or spray dried formulation administered by an inhalation device or nebulizer, providing rapid local uptake of the nucleic acid molecules into relevant pulmonary tissues. Solid particulate compositions containing respirable dry particles of micronized nucleic acid compositions can be prepared by grinding dried or lyophilized nucleic acid compositions, and then passing the micronized composition through, for example, a 400 mesh screen to break up or separate out large agglomerates. A solid particulate composition comprising the nucleic acid compositions of the invention can optionally contain a dispersant which serves to facilitate the formation of an aerosol as well as other therapeutic compounds. A suitable dispersant is lactose, which can be blended with the nucleic acid compound in any suitable ratio, such as a 1 to 1 ratio by weight.

[0442] Aerosols of liquid particles comprising a nucleic acid composition of the invention can be produced by any suitable means, such as with a nebulizer (see for example U.S. Pat. No. 4,501,729). Nebulizers are commercially available devices which transform solutions or suspensions of an active ingredient into a therapeutic aerosol mist either by means of acceleration of a compressed gas, typically air or oxygen, through a narrow venturi orifice or by means of ultrasonic agitation. Suitable formulations for use in nebulizers comprise the active ingredient in a liquid carrier in an amount of up to 40% w/w preferably less than 20% w/w of the formulation. The carrier is typically water or a dilute aqueous alcoholic solution, preferably made isotonic with body fluids by the addition of, for example, sodium chloride or other suitable salts. Optional additives include preservatives if the formulation is not prepared sterile, for example, methyl hydroxybenzoate, anti-oxidants, flavorings, volatile oils, buffering agents and emulsifiers and other formulation surfactants. The aerosols of solid particles comprising the active composition and surfactant can likewise be produced with any solid particulate aerosol generator. Aerosol generators for administering solid particulate therapeutics to a subject produce particles which are respirable, as explained above, and generate a volume of aerosol containing a predetermined metered dose of a therapeutic composition at a rate suitable for human administration. One illustrative type of solid particulate aerosol generator is an insufflator. Suitable formulations for administration by insufflation include finely comminuted powders which can be delivered by means of an insufflator. In the insufflator, the powder, e.g., a metered dose thereof effective to carry out the treatments described herein, is contained in capsules or cartridges, typically made of gelatin or plastic, which are either pierced or opened in situ and the powder delivered by air drawn through the device upon inhalation or by means of a manually-operated pump. The powder employed in the insufflator consists either solely of the active ingredient or of a powder blend comprising the active ingredient, a suitable powder diluent, such as lactose, and an optional surfactant. The active ingredient typically comprises from 0.1 to 100 w/w of the formulation. A second type of illustrative aerosol generator comprises a metered dose inhaler. Metered dose inhalers are pressurized aerosol dispensers, typically containing a suspension or solution formulation of the active ingredient in a liquified propellant. During use these devices discharge the formulation through a valve adapted to deliver a metered volume to produce a fine particle spray containing the active ingredient. Suitable propellants include certain chlorofluorocarbon compounds, for example, dichlorodifluoromethane, trichlorofluoromethane, dichlorotetrafluoroethane and mixtures thereof. The formulation can additionally contain one or more co-solvents, for example, ethanol, emulsifiers and other formulation surfactants, such as oleic acid or sorbitan trioleate, anti-oxidants and suitable flavoring agents. Other methods for pulmonary delivery are described in, for example U.S. Patent Application No. 20040037780, and U.S. Pat. Nos. 6,592,904; 6,582,728; 6,565,885.

[0443] In one embodiment, the siNA molecules of the invention and formulations or compositions thereof are administered directly or topically (e.g., locally) to the dermis or follicles as is generally known in the art (see for example Brand, 2001, Curr. Opin. Mol. Ther., 3, 244-8; Regnier et al., 1998, J. Drug Target, 5, 275-89; Kanikkannan, 2002, BioDrugs, 16, 339-47; Wraight et al., 2001, Pharmacol. Ther., 90, 89-104; Preat and Dujardin, 2001, STP PharmaSciences, 11, 57-68; and Vogt et al., 2003, Hautarzt. 54, 692-8).

[0444] In one embodiment, delivery systems of the invention include, for example, aqueous and nonaqueous gels, creams, multiple emulsions, microemulsions, liposomes, ointments, aqueous and nonaqueous solutions, lotions, aerosols, hydrocarbon bases and powders, and can contain excipients such as solubilizers, permeation enhancers (e.g., fatty acids, fatty acid esters, fatty alcohols and amino acids), and hydrophilic polymers (e.g., polycarbophil and polyvinylpyrolidone). In one embodiment, the pharmaceutically acceptable carrier is a liposome or a transdermal enhancer. Examples of liposomes which can be used in this invention include the following: (1) CellFectin, 1:1.5 (M/M) liposome formulation of the cationic lipid N,NI,NII,NIII-tetramethyl-N,NI,NII,NIII-tetrapalmit-y-spermine and dioleoyl phosphatidylethanolamine (DOPE) (GIBCO BRL); (2) Cytofectin GSV, 2:1 (M/M) liposome formulation of a cationic lipid and DOPE (Glen Research); (3) DOTAP (N-[1-(2,3-dioleoyloxy)-N,N,N-tri-methyl-ammoniummethylsulfate) (Boehringer Manheim); and (4) Lipofectamine, 3:1 (M/M) liposome formulation of the polycationic lipid DOSPA and the neutral lipid DOPE (GIBCO BRL).

[0445] In one embodiment, delivery systems of the invention include patches, tablets, suppositories, pessaries, gels and creams, and can contain excipients such as solubilizers and enhancers (e.g., propylene glycol, bile salts and amino acids), and other vehicles (e.g., polyethylene glycol, fatty acid esters and derivatives, and hydrophilic polymers such as hydroxypropylmethylcellulose and hyaluronic acid).

[0446] In one embodiment, transdermal delivery systems of the invention include patches, tablets, suppositories, pessaries, gels and creams, and can contain excipients such as solubilizers and enhancers (e.g., propylene glycol, bile salts and amino acids), and other vehicles (e.g., polyethylene glycol, fatty acid esters and derivatives, and hydrophilic polymers such as hydroxypropylmethylcellulose and hyaluronic acid).

[0447] In one embodiment, siNA molecules of the invention are formulated or complexed with polyethylenimine (e.g., linear or branched PEI) and/or polyethylenimine derivatives, including for example grafted PEIs such as galactose PEI, cholesterol PEI, antibody derivatized PEI, and polyethylene glycol PEI (PEG-PEI) derivatives thereof (see for example Ogris et al., 2001, AAPA PharmSci, 3, 1-11; Furgeson et al., 2003, Bioconjugate Chem., 14, 840-847; Kunath et al., 2002, Phramaceutical Research, 19, 810-817; Choi et al., 2001, Bull. Korean Chem. Soc., 22, 46-52; Bettinger et al., 1999, Bioconjugate Chem., 10, 558-561; Peterson et al., 2002, Bioconjugate Chem., 13, 845-854; Erbacher et al., 1999, Journal of Gene Medicine Preprint, 1, 1-18; Godbey et al., 1999., PNAS USA, 96, 5177-5181; Godbey et al., 1999, Journal of Controlled Release, 60, 149-160; Diebold et al., 1999, Journal of Biological Chemistry, 274, 19087-19094; Thomas and Klibanov, 2002, PNAS USA, 99, 14640-14645; and Sagara, U.S. Pat. No. 6,586,524, incorporated by reference herein.

[0448] In one embodiment, a siNA molecule of the invention comprises a bioconjugate, for example a nucleic acid conjugate as described in Vargeese et al., U.S. Ser. No. 10/427,160, filed Apr. 30, 2003; U.S. Pat. No. 6,528,631; U.S. Pat. No. 6,335,434; U.S. Pat. No. 6,235,886; U.S. Pat. No. 6,153,737; U.S. Pat. No. 5,214,136; U.S. Pat. No. 5,138,045, all incorporated by reference herein.

[0449] Thus, the invention features a pharmaceutical composition comprising one or more nucleic acid(s) of the invention in an acceptable carrier, such as a stabilizer, buffer, and the like. The polynucleotides of the invention can be administered (e.g., RNA, DNA or protein) and introduced to a subject by any standard means, with or without stabilizers, buffers, and the like, to form a pharmaceutical composition. When it is desired to use a liposome delivery mechanism, standard protocols for formation of liposomes can be followed. The compositions of the present invention can also be formulated and used as creams, gels, sprays, oils and other suitable compositions for topical, dermal, or transdermal administration as is known in the art.

[0450] The present invention also includes pharmaceutically acceptable formulations of the compounds described. These formulations include salts of the above compounds, e.g., acid addition salts, for example, salts of hydrochloric, hydrobromic, acetic acid, and benzene sulfonic acid.

[0451] A pharmacological composition or formulation refers to a composition or formulation in a form suitable for administration, e.g., systemic or local administration, into a cell or subject, including for example a human. Suitable forms, in part, depend upon the use or the route of entry, for example oral, transdermal, or by injection. Such forms should not prevent the composition or formulation from reaching a target cell (i.e., a cell to which the negatively charged nucleic acid is desirable for delivery). For example, pharmacological compositions injected into the blood stream should be soluble. Other factors are known in the art, and include considerations such as toxicity and forms that prevent the composition or formulation from exerting its effect.

[0452] In one embodiment, siNA molecules of the invention are administered to a subject by systemic administration in a pharmaceutically acceptable composition or formulation. By “systemic administration” is meant in vivo systemic absorption or accumulation of drugs in the blood stream followed by distribution throughout the entire body. Administration routes that lead to systemic absorption include, without limitation: intravenous, subcutaneous, intraperitoneal, inhalation, oral, intrapulmonary and intramuscular. Each of these administration routes exposes the siNA molecules of the invention to an accessible diseased tissue. The rate of entry of a drug into the circulation has been shown to be a function of molecular weight or size. The use of a liposome or other drug carrier comprising the compounds of the instant invention can potentially localize the drug, for example, in certain tissue types, such as the tissues of the reticular endothelial system (RES). A liposome formulation that can facilitate the association of drug with the surface of cells, such as, lymphocytes and macrophages is also useful. This approach can provide enhanced delivery of the drug to target cells by taking advantage of the specificity of macrophage and lymphocyte immune recognition of abnormal cells.

[0453] By “pharmaceutically acceptable formulation” or “pharmaceutically acceptable composition” is meant, a composition or formulation that allows for the effective distribution of the nucleic acid molecules of the instant invention in the physical location most suitable for their desired activity. Non-limiting examples of agents suitable for formulation with the nucleic acid molecules of the instant invention include: P-glycoprotein inhibitors (such as Pluronic P85); biodegradable polymers, such as poly (DL-lactide-coglycolide) microspheres for sustained release delivery (Emerich, D F et al, 1999, Cell Transplant, 8, 47-58); and loaded nanoparticles, such as those made of polybutylcyanoacrylate. Other non-limiting examples of delivery strategies for the nucleic acid molecules of the instant invention include material described in Boado et al., 1998, J. Pharm. Sci., 87, 1308-1315; Tyler et al., 1999, FEBS Lett., 421, 280-284; Pardridge et al., 1995, PNAS USA., 92, 5592-5596; Boado, 1995, Adv. Drug Delivery Rev., 15, 73-107; Aldrian-Herrada et al., 1998, Nucleic Acids Res., 26, 4910-4916; and Tyler et al., 1999, PNAS USA., 96, 7053-7058.

[0454] The invention also features the use of a composition comprising surface-modified liposomes containing poly (ethylene glycol) lipids (PEG-modified, or long-circulating liposomes or stealth liposomes) and nucleic acid molecules of the invention. These formulations offer a method for increasing the accumulation of drugs (e.g., siNA) in target tissues. This class of drug carriers resists opsonization and elimination by the mononuclear phagocytic system (MPS or RES), thereby enabling longer blood circulation times and enhanced tissue exposure for the encapsulated drug (Lasic et al. Chem. Rev. 1995, 95, 2601-2627; Ishiwata et al., Chem. Pharm. Bull. 1995, 43, 1005-1011). Such liposomes have been shown to accumulate selectively in tumors, presumably by extravasation and capture in the neovascularized target tissues (Lasic et al., Science 1995, 267, 1275-1276; Oku et al., 1995, Biochim. Biophys. Acta, 1238, 86-90). The long-circulating liposomes enhance the pharmacokinetics and pharmacodynamics of DNA and RNA, particularly compared to conventional cationic liposomes which are known to accumulate in tissues of the MPS (Liu et al., J. Biol. Chem. 1995, 42, 24864-24870; Choi et al., International PCT Publication No. WO 96/10391; Ansell et al., International PCT Publication No. WO 96/10390; Holland et al., International PCT Publication No. WO 96/10392). Long-circulating liposomes are also likely to protect drugs from nuclease degradation to a greater extent compared to cationic liposomes, based on their ability to avoid accumulation in metabolically aggressive MPS tissues such as the liver and spleen.

[0455] The present invention also includes compositions prepared for storage or administration that include a pharmaceutically effective amount of the desired compounds in a pharmaceutically acceptable carrier or diluent. Acceptable carriers or diluents for therapeutic use are well known in the pharmaceutical art, and are described, for example, in Remington's Pharmaceutical Sciences, Mack Publishing Co. (A. R. Gennaro edit. 1985), hereby incorporated by reference herein. For example, preservatives, stabilizers, dyes and flavoring agents can be provided. These include sodium benzoate, sorbic acid and esters of p-hydroxybenzoic acid. In addition, antioxidants and suspending agents can be used.

[0456] A pharmaceutically effective dose is that dose required to prevent, inhibit the occurrence, or treat (alleviate a symptom to some extent, preferably all of the symptoms) of a disease state. The pharmaceutically effective dose depends on the type of disease, the composition used, the route of administration, the type of mammal being treated, the physical characteristics of the specific mammal under consideration, concurrent medication, and other factors that those skilled in the medical arts will recognize. Generally, an amount between 0.1 mg/kg and 100 mg/kg body weight/day of active ingredients is administered dependent upon potency of the negatively charged polymer.

[0457] The nucleic acid molecules of the invention and formulations thereof can be administered orally, topically, parenterally, by inhalation or spray, or rectally in dosage unit formulations containing conventional non-toxic pharmaceutically acceptable carriers, adjuvants and/or vehicles. The term parenteral as used herein includes percutaneous, subcutaneous, intravascular (e.g., intravenous), intramuscular, or intrathecal injection or infusion techniques and the like. In addition, there is provided a pharmaceutical formulation comprising a nucleic acid molecule of the invention and a pharmaceutically acceptable carrier. One or more nucleic acid molecules of the invention can be present in association with one or more non-toxic pharmaceutically acceptable carriers and/or diluents and/or adjuvants, and if desired other active ingredients. The pharmaceutical compositions containing nucleic acid molecules of the invention can be in a form suitable for oral use, for example, as tablets, troches, lozenges, aqueous or oily suspensions, dispersible powders or granules, emulsion, hard or soft capsules, or syrups or elixirs.

[0458] Compositions intended for oral use can be prepared according to any method known to the art for the manufacture of pharmaceutical compositions and such compositions can contain one or more such sweetening agents, flavoring agents, coloring agents or preservative agents in order to provide pharmaceutically elegant and palatable preparations. Tablets contain the active ingredient in admixture with non-toxic pharmaceutically acceptable excipients that are suitable for the manufacture of tablets. These excipients can be, for example, inert diluents; such as calcium carbonate, sodium carbonate, lactose, calcium phosphate or sodium phosphate; granulating and disintegrating agents, for example, corn starch, or alginic acid; binding agents, for example starch, gelatin or acacia; and lubricating agents, for example magnesium stearate, stearic acid or talc. The tablets can be uncoated or they can be coated by known techniques. In some cases such coatings can be prepared by known techniques to delay disintegration and absorption in the gastrointestinal tract and thereby provide a sustained action over a longer period. For example, a time delay material such as glyceryl monosterate or glyceryl distearate can be employed.

[0459] Formulations for oral use can also be presented as hard gelatin capsules wherein the active ingredient is mixed with an inert solid diluent, for example, calcium carbonate, calcium phosphate or kaolin, or as soft gelatin capsules wherein the active ingredient is mixed with water or an oil medium, for example peanut oil, liquid paraffin or olive oil.

[0460] Aqueous suspensions contain the active materials in a mixture with excipients suitable for the manufacture of aqueous suspensions. Such excipients are suspending agents, for example sodium carboxymethylcellulose, methylcellulose, hydropropyl-methylcellulose, sodium alginate, polyvinylpyrrolidone, gum tragacanth and gum acacia; dispersing or wetting agents can be a naturally-occurring phosphatide, for example, lecithin, or condensation products of an alkylene oxide with fatty acids, for example polyoxyethylene stearate, or condensation products of ethylene oxide with long chain aliphatic alcohols, for example heptadecaethyleneoxycetanol, or condensation products of ethylene oxide with partial esters derived from fatty acids and a hexitol such as polyoxyethylene sorbitol monooleate, or condensation products of ethylene oxide with partial esters derived from fatty acids and hexitol anhydrides, for example polyethylene sorbitan monooleate. The aqueous suspensions can also contain one or more preservatives, for example ethyl, or n-propyl p-hydroxybenzoate, one or more coloring agents, one or more flavoring agents, and one or more sweetening agents, such as sucrose or saccharin.

[0461] Oily suspensions can be formulated by suspending the active ingredients in a vegetable oil, for example arachis oil, olive oil, sesame oil or coconut oil, or in a mineral oil such as liquid paraffin. The oily suspensions can contain a thickening agent, for example beeswax, hard paraffin or cetyl alcohol. Sweetening agents and flavoring agents can be added to provide palatable oral preparations. These compositions can be preserved by the addition of an anti-oxidant such as ascorbic acid.

[0462] Dispersible powders and granules suitable for preparation of an aqueous suspension by the addition of water provide the active ingredient in admixture with a dispersing or wetting agent, suspending agent and one or more preservatives. Suitable dispersing or wetting agents or suspending agents are exemplified by those already mentioned above. Additional excipients, for example sweetening, flavoring and coloring agents, can also be present.

[0463] Pharmaceutical compositions of the invention can also be in the form of oil-in-water emulsions. The oily phase can be a vegetable oil or a mineral oil or mixtures of these. Suitable emulsifying agents can be naturally-occurring gums, for example gum acacia or gum tragacanth, naturally-occurring phosphatides, for example soy bean, lecithin, and esters or partial esters derived from fatty acids and hexitol, anhydrides, for example sorbitan monooleate, and condensation products of the said partial esters with ethylene oxide, for example polyoxyethylene sorbitan monooleate. The emulsions can also contain sweetening and flavoring agents.

[0464] Syrups and elixirs can be formulated with sweetening agents, for example glycerol, propylene glycol, sorbitol, glucose or sucrose. Such formulations can also contain a demulcent, a preservative and flavoring and coloring agents. The pharmaceutical compositions can be in the form of a sterile injectable aqueous or oleaginous suspension. This suspension can be formulated according to the known art using those suitable dispersing or wetting agents and suspending agents that have been mentioned above. The sterile injectable preparation can also be a sterile injectable solution or suspension in a non-toxic parentally acceptable diluent or solvent, for example as a solution in 1,3-butanediol. Among the acceptable vehicles and solvents that can be employed are water, Ringer's solution and isotonic sodium chloride solution. In addition, sterile, fixed oils are conventionally employed as a solvent or suspending medium. For this purpose, any bland fixed oil can be employed including synthetic mono- or diglycerides. In addition, fatty acids such as oleic acid find use in the preparation of injectables.

[0465] The nucleic acid molecules of the invention can also be administered in the form of suppositories, e.g., for rectal administration of the drug. These compositions can be prepared by mixing the drug with a suitable non-irritating excipient that is solid at ordinary temperatures but liquid at the rectal temperature and will therefore melt in the rectum to release the drug. Such materials include cocoa butter and polyethylene glycols.

[0466] Nucleic acid molecules of the invention can be administered parenterally in a sterile medium. The drug, depending on the vehicle and concentration used, can either be suspended or dissolved in the vehicle. Advantageously, adjuvants such as local anesthetics, preservatives and buffering agents can be dissolved in the vehicle.

[0467] Dosage levels of the order of from about 0.1 mg to about 140 mg per kilogram of body weight per day are useful in the treatment of the above-indicated conditions (about 0.5 mg to about 7 g per subject per day). The amount of active ingredient that can be combined with the carrier materials to produce a single dosage form varies depending upon the host treated and the particular mode of administration. Dosage unit forms generally contain between from about 1 mg to about 500 mg of an active ingredient.

[0468] It is understood that the specific dose level for any particular subject depends upon a variety of factors including the activity of the specific compound employed, the age, body weight, general health, sex, diet, time of administration, route of administration, and rate of excretion, drug combination and the severity of the particular disease undergoing therapy.

[0469] For administration to non-human animals, the composition can also be added to the animal feed or drinking water. It can be convenient to formulate the animal feed and drinking water compositions so that the animal takes in a therapeutically appropriate quantity of the composition along with its diet. It can also be convenient to present the composition as a premix for addition to the feed or drinking water.

[0470] The nucleic acid molecules of the present invention can also be administered to a subject in combination with other therapeutic compounds to increase the overall therapeutic effect. The use of multiple compounds to treat an indication can increase the beneficial effects while reducing the presence of side effects.

[0471] In one embodiment, the invention comprises compositions suitable for administering nucleic acid molecules of the invention to specific cell types. For example, the asialoglycoprotein receptor (ASGPr) (Wu and Wu, 1987, J. Biol. Chem. 262, 4429-4432) is unique to hepatocytes and binds branched galactose-terminal glycoproteins, such as asialoorosomucoid (ASOR). In another example, the folate receptor is overexpressed in many cancer cells. Binding of such glycoproteins, synthetic glycoconjugates, or folates to the receptor takes place with an affinity that strongly depends on the degree of branching of the oligosaccharide chain, for example, triatennary structures are bound with greater affinity than biatenarry or monoatennary chains (Baenziger and Fiete, 1980, Cell, 22, 611-620; Connolly et al., 1982, J. Biol. Chem., 257, 939-945). Lee and Lee, 1987, Glycoconjugate J., 4, 317-328, obtained this high specificity through the use of N-acetyl-D-galactosamine as the carbohydrate moiety, which has higher affinity for the receptor, compared to galactose. This “clustering effect” has also been described for the binding and uptake of mannosyl-terminating glycoproteins or glycoconjugates (Ponpipom et al., 1981, J. Med. Chem., 24, 1388-1395). The use of galactose, galactosamine, or folate based conjugates to transport exogenous compounds across cell membranes can provide a targeted delivery approach to, for example, the treatment of liver disease, cancers of the liver, or other cancers. The use of bioconjugates can also provide a reduction in the required dose of therapeutic compounds required for treatment. Furthermore, therapeutic bioavailability, pharmacodynamics, and pharmacokinetic parameters can be modulated through the use of nucleic acid bioconjugates of the invention. Non-limiting examples of such bioconjugates are described in Vargeese et al., U.S. Ser. No. 10/201,394, filed Aug. 13, 2001; and Matulic-Adamic et al., U.S. Ser. No. 60/362,016, filed Mar. 6, 2002.

[0472] Alternatively, certain siNA molecules of the instant invention can be expressed within cells from eukaryotic promoters (e.g., Izant and Weintraub, 1985, Science, 229, 345; McGarry and Lindquist, 1986, Proc. Natl. Acad. Sci., USA 83, 399; Scanlon et al., 1991, Proc. Natl. Acad. Sci. USA, 88, 10591-5; Kashani-Sabet et al., 1992, Antisense Res. Dev., 2, 3-15; Dropulic et al., 1992, J. Virol., 66, 1432-41; Weerasinghe et al., 1991, J. Virol., 65, 55314; Ojwang et al., 1992, Proc. Natl. Acad. Sci. USA, 89, 10802-6; Chen et al., 1992, Nucleic Acids Res., 20, 4581-9; Sarver et al., 1990 Science, 247, 1222-1225; Thompson et al., 1995, Nucleic Acids Res., 23, 2259; Good et al., 1997, Gene Therapy, 4, 45. Those skilled in the art realize that any nucleic acid can be expressed in eukaryotic cells from the appropriate DNA/RNA vector. The activity of such nucleic acids can be augmented by their release from the primary transcript by a enzymatic nucleic acid (Draper et al., PCT WO 93/23569, and Sullivan et al., PCT WO 94/02595; Ohkawa et al., 1992, Nucleic Acids Symp. Ser., 27, 15-6; Taira et al., 1991, Nucleic Acids Res., 19, 5125-30; Ventura et al., 1993, Nucleic Acids Res., 21, 3249-55; Chowrira et al., 1994, J. Biol. Chem., 269, 25856.

[0473] In another aspect of the invention, RNA molecules of the present invention can be expressed from transcription units (see for example Couture et al., 1996, TIG., 12, 510) inserted into DNA or RNA vectors. The recombinant vectors can be DNA plasmids or viral vectors. siNA expressing viral vectors can be constructed based on, but not limited to, adeno-associated virus, retrovirus, adenovirus, or alphavirus. In another embodiment, pol III based constructs are used to express nucleic acid molecules of the invention (see for example Thompson, U.S. Pat. Nos. 5,902,880 and 6,146,886). The recombinant vectors capable of expressing the siNA molecules can be delivered as described above, and persist in target cells. Alternatively, viral vectors can be used that provide for transient expression of nucleic acid molecules. Such vectors can be repeatedly administered as necessary. Once expressed, the siNA molecule interacts with the target mRNA and generates an RNAi response. Delivery of siNA molecule expressing vectors can be systemic, such as by intravenous or intra-muscular administration, by administration to target cells ex-planted from a subject followed by reintroduction into the subject, or by any other means that would allow for introduction into the desired target cell (for a review see Couture et al., 1996, TIG., 12, 510).

[0474] In one aspect the invention features an expression vector comprising a nucleic acid sequence encoding at least one siNA molecule of the instant invention. The expression vector can encode one or both strands of a siNA duplex, or a single self-complementary strand that self hybridizes into a siNA duplex. The nucleic acid sequences encoding the siNA molecules of the instant invention can be operably linked in a manner that allows expression of the siNA molecule (see for example Paul et al., 2002, Nature Biotechnology, 19, 505; Miyagishi and Taira, 2002, Nature Biotechnology, 19, 497; Lee et al., 2002, Nature Biotechnology, 19, 500; and Novina et al., 2002, Nature Medicine, advance online publication doi:10.1038/nm725).

[0475] In another aspect, the invention features an expression vector comprising: a) a transcription initiation region (e.g., eukaryotic pol I, II or III initiation region); b) a transcription termination region (e.g., eukaryotic pol I, II or III termination region); and c) a nucleic acid sequence encoding at least one of the siNA molecules of the instant invention, wherein said sequence is operably linked to said initiation region and said termination region in a manner that allows expression and/or delivery of the siNA molecule. The vector can optionally include an open reading frame (ORF) for a protein operably linked on the 5′ side or the 3′-side of the sequence encoding the siNA of the invention; and/or an intron (intervening sequences).

[0476] Transcription of the siNA molecule sequences can be driven from a promoter for eukaryotic RNA polymerase I (pol I), RNA polymerase II (pol II), or RNA polymerase III (pol III). Transcripts from pol II or pol III promoters are expressed at high levels in all cells; the levels of a given pol II promoter in a given cell type depends on the nature of the gene regulatory sequences (enhancers, silencers, etc.) present nearby. Prokaryotic RNA polymerase promoters are also used, providing that the prokaryotic RNA polymerase enzyme is expressed in the appropriate cells (Elroy-Stein and Moss, 1990, Proc. Natl. Acad. Sci. USA, 87, 6743-7; Gao and Huang 1993, Nucleic Acids Res., 21, 2867-72; Lieber et al., 1993, Methods Enzymol., 217, 47-66; Zhou et al., 1990, Mol. Cell. Biol., 10, 4529-37). Several investigators have demonstrated that nucleic acid molecules expressed from such promoters can function in mammalian cells (e.g. Kashani-Sabet et al., 1992, Antisense Res. Dev., 2, 3-15; Ojwang et al., 1992, Proc. Natl. Acad. Sci. USA, 89, 10802-6; Chen et al., 1992, Nucleic Acids Res., 20, 4581-9; Yu et al., 1993, Proc. Natl. Acad. Sci. USA, 90, 6340-4; L'Huillier et al., 1992, EMBO J., 11, 4411-8; Lisziewicz et al., 1993, Proc. Natl. Acad. Sci. U.S.A, 90, 8000-4; Thompson et al., 1995, Nucleic Acids Res., 23, 2259; Sullenger & Cech, 1993, Science, 262, 1566). More specifically, transcription units such as the ones derived from genes encoding U6 small nuclear (snRNA), transfer RNA (tRNA) and adenovirus VA RNA are useful in generating high concentrations of desired RNA molecules such as siNA in cells (Thompson et al., supra; Couture and Stinchcomb, 1996, supra; Noonberg et al., 1994, Nucleic Acid Res., 22, 2830; Noonberg et al., U.S. Pat. No. 5,624,803; Good et al., 1997, Gene Ther., 4, 45; Beigelman et al., International PCT Publication No. WO 96/18736. The above siNA transcription units can be incorporated into a variety of vectors for introduction into mammalian cells, including but not restricted to, plasmid DNA vectors, viral DNA vectors (such as adenovirus or adeno-associated virus vectors), or viral RNA vectors (such as retroviral or alphavirus vectors) (for a review see Couture and Stinchcomb, 1996, supra).

[0477] In another aspect the invention features an expression vector comprising a nucleic acid sequence encoding at least one of the siNA molecules of the invention in a manner that allows expression of that siNA molecule. The expression vector comprises in one embodiment; a) a transcription initiation region; b) a transcription termination region; and c) a nucleic acid sequence encoding at least one strand of the siNA molecule, wherein the sequence is operably linked to the initiation region and the termination region in a manner that allows expression and/or delivery of the siNA molecule.

[0478] In another embodiment the expression vector comprises: a) a transcription initiation region; b) a transcription termination region; c) an open reading frame; and d) a nucleic acid sequence encoding at least one strand of a siNA molecule, wherein the sequence is operably linked to the 3′-end of the open reading frame and wherein the sequence is operably linked to the initiation region, the open reading frame and the termination region in a manner that allows expression and/or delivery of the siNA molecule. In yet another embodiment, the expression vector comprises: a) a transcription initiation region; b) a transcription termination region; c) an intron; and d) a nucleic acid sequence encoding at least one siNA molecule, wherein the sequence is operably linked to the initiation region, the intron and the termination region in a manner which allows expression and/or delivery of the nucleic acid molecule.

[0479] In another embodiment, the expression vector comprises: a) a transcription initiation region; b) a transcription termination region; c) an intron; d) an open reading frame; and e) a nucleic acid sequence encoding at least one strand of a siNA molecule, wherein the sequence is operably linked to the 3′-end of the open reading frame and wherein the sequence is operably linked to the initiation region, the intron, the open reading frame and the termination region in a manner which allows expression and/or delivery of the siNA molecule.

VEGF and/or VEGFR Biology and Biochemistry

[0480] The following discussion is adapted from R&D Systems, Cytokine Mini Reviews, Vascular Endothelial Growth Factor (VEGF), Copyright ©2002 R&D Systems. Angiogenesis is a process of new blood vessel development from pre-existing vasculature. It plays an essential role in embryonic development, normal growth of tissues, wound healing, the female reproductive cycle (i.e., ovulation, menstruation and placental development), as well as a major role in many diseases. Particular interest has focused on cancer, since tumors cannot grow beyond a few millimeters in size without developing a new blood supply. Angiogenesis is also necessary for the spread and growth of tumor cell metastases.

[0481] One of the most important growth and survival factors for endothelium is vascular endothelial growth factor (VEGF). VEGF induces angiogenesis and endothelial cell proliferation and plays an important role in regulating vasculogenesis. VEGF is a heparin-binding glycoprotein that is secreted as a homodimer of 45 kDa. Most types of cells, but usually not endothelial cells themselves, secrete VEGF. Since the initially discovered VEGF, VEGF-A, increases vascular permeability, it was known as vascular permeability factor. In addition, VEGF causes vasodilatation, partly through stimulation of nitric oxide synthase in endothelial cells. VEGF can also stimulate cell migration and inhibit apoptosis.

[0482] There are several splice variants of VEGF-A. The major ones include: 121, 165, 189 and 206 amino acids (aa), each one comprising a specific exon addition. VEGF165 is the most predominant protein, but transcripts of VEGF 121 may be more abundant. VEGF206 is rarely expressed and has been detected only in fetal liver. Recently, other splice variants of 145 and 183 aa have also been described. The 165, 189 and 206 aa splice variants have heparin-binding domains, which help anchor them in extracellular matrix and are involved in binding to heparin sulfate and presentation to VEGF receptors. Such presentation is a key factor for VEGF potency (i.e., the heparin-binding forms are more active). Several other members of the VEGF family have been cloned including VEGF-B, -C, and -D. Placenta growth factor (PlGF) is also closely related to VEGF-A. VEGF-A, -B, -C, -D, and PlGF are all distantly related to platelet-derived growth factors-A and -B. Less is known about the function and regulation of VEGF-B, -C, and -D, but they do not seem to be regulated by the major pathways that regulate VEGF-A.

[0483] VEGF-A transcription is potentiated in response to hypoxia and by activated oncogenes. The transcription factors, hypoxia inducible factor-1a (hif-1a) and -2a, are degraded by proteosomes in normoxia and stabilized in hypoxia. This pathway is dependent on the Von Hippel-Lindau gene product. Hif-1a and hif-2a heterodimerize with the aryl hydrocarbon nuclear translocator in the nucleus and bind the VEGF promoter/enhancer. This is a key pathway expressed in most types of cells. Hypoxia inducibility, in particular, characterizes VEGF-A versus other members of the VEGF family and other angiogenic factors. VEGF transcription in normoxia is activated by many oncogenes, including H-ras and several transmembrane tyrosine kinases, such as the epidermal growth factor receptor and erbB2. These pathways together account for a marked upregulation of VEGF-A in tumors compared to normal tissues and are often of prognostic importance.

[0484] There are three receptors in the VEGF receptor family. They have the common properties of multiple IgG-like extracellular domains and tyrosine kinase activity. The enzyme domains of VEGF receptor 1 (VEGFR1, also known as Flt-1), VEGFR2 (also known as KDR or Flk-1), and VEGFR3 (also known as Flt-4) are divided by an inserted sequence. Endothelial cells also express additional VEGF receptors, Neuropilin-1 and Neuropilin-2. VEGF-A binds to VEGFR1 and VEGFR2 and to Neuropilin-1 and Neuropilin-2. PlGF and VEGF-B bind VEGFR1 and Neuropilin-1. VEGF-C and -D bind VEGFR3 and VEGFR2.

[0485] The VEGF-C/VEGFR3 pathway is important for lymphatic proliferation. VEGFR3 is specifically expressed on lymphatic endothelium. A soluble form of Fit-1 can be detected in peripheral blood and is a high affinity ligand for VEGF. Soluble Flt-1 can be used to antagonize VEGF function. VEGFR1 and VEGFR2 are upregulated in tumor and proliferating endothelium, partly by hypoxia and also in response to VEGF-A itself. VEGFR1 and VEGFR2 can interact with multiple downstream signaling pathways via proteins such as PLC-g, Ras, Shc, Nck, PKC and PI3-kinase. VEGFR1 is of higher affinity than VEGFR2 and mediates motility and vascular permeability. VEGFR2 is necessary for proliferation.

[0486] VEGF can be detected in both plasma and serum samples of patients, with much higher levels in serum. Platelets release VEGF upon aggregation and may be a major source of VEGF delivery to tumors. Several studies have shown that association of high serum levels of VEGF with poor prognosis in cancer patients may be correlated with an elevated platelet count. Many tumors release cytokines that can stimulate the production of megakaryocytes in the marrow and elevate the platelet count. This can result in an indirect increase of VEGF delivery to tumors.

[0487] VEGF is implicated in several other pathological conditions associated with enhanced angiogenesis. For example, VEGF plays a role in both psoriasis and rheumatoid arthritis. Diabetic retinopathy is associated with high intraocular levels of VEGF. Inhibition of VEGF function may result in infertility by blockade of corpus luteum function. Direct demonstration of the importance of VEGF in tumor growth has been achieved using dominant negative VEGF receptors to block in vivo proliferation, as well as blocking antibodies to VEGF39 or to VEGFR2.

[0488] The use of small interfering nucleic acid molecules targeting VEGF and corresponding receptors and ligands therefore provides a class of novel therapeutic agents that can be used in the diagnosis of and the treatment of inflammatory diseases and conditions, respiratory diseases and conditions, allergic diseases and conditions, autoimmune diseases and conditions, neurologic diseases and conditions, ocular diseases and conditions, and cancer and other proliferative diseases and conditions, or any other disease or condition that responds to modulation of VEGF and/or VEGFR genes or other genes involved in VEGF and/or VEGFR biologic pathways, such as interleukins and interleukin receptors.

### EXAMPLES

[0489] The following are non-limiting examples showing the selection, isolation, synthesis and activity of nucleic acids of the instant invention.

### Example 1

### Tandem Synthesis of siNA Constructs

[0490] Exemplary siNA molecules of the invention are synthesized in tandem using a cleavable linker, for example, a succinyl-based linker. Tandem synthesis as described herein is followed by a one-step purification process that provides RNAi molecules in high yield. This approach is highly amenable to siNA synthesis in support of high throughput RNAi screening, and can be readily adapted to multi-column or multi-well synthesis platforms.

[0491] After completing a tandem synthesis of a siNA oligo and its complement in which the 5′-terminal dimethoxytrityl (5′-O-DMT) group remains intact (trityl on synthesis), the oligonucleotides are deprotected as described above. Following deprotection, the siNA sequence strands are allowed to spontaneously hybridize. This hybridization yields a duplex in which one strand has retained the 5′-O-DMT group while the complementary strand comprises a terminal 5′-hydroxyl. The newly formed duplex behaves as a single molecule during routine solid-phase extraction purification (Trityl-On purification) even though only one molecule has a dimethoxytrityl group. Because the strands form a stable duplex, this dimethoxytrityl group (or an equivalent group, such as other trityl groups or other hydrophobic moieties) is all that is required to purify the pair of oligos, for example, by using a C18 cartridge.

[0492] Standard phosphoramidite synthesis chemistry is used up to the point of introducing a tandem linker, such as an inverted deoxy abasic succinate or glyceryl succinate linker (see FIG. 1) or an equivalent cleavable linker. A non-limiting example of linker coupling conditions that can be used includes a hindered base such as diisopropylethylamine (DIPA) and/or DMAP in the presence of an activator reagent such as Bromotripyrrolidinophosphoniumhexaflurorophosphate (PyBrOP). After the linker is coupled, standard synthesis chemistry is utilized to complete synthesis of the second sequence leaving the terminal the 5′-O-DMT intact. Following synthesis, the resulting oligonucleotide is deprotected according to the procedures described herein and quenched with a suitable buffer, for example with 50 mM NaOAc or 1.5M NH₄H₂CO₃.

[0493] Purification of the siNA duplex can be readily accomplished using solid phase extraction, for example, using a Waters C18 SepPak 1 g cartridge conditioned with 1 column volume (CV) of acetonitrile, 2 CV H2O, and 2 CV 50 mM NaOAc. The sample is loaded and then washed with 1 CV H2O or 50 mM NaOAc. Failure sequences are eluted with 1 CV 14% ACN (Aqueous with 50 mM NaOAc and 50 mM NaCl). The column is then washed, for example with 1 CV H2O followed by on-column detritylation, for example by passing 1 CV of 1% aqueous trifluoroacetic acid (TFA) over the column, then adding a second CV of 1% aqueous TFA to the column and allowing to stand for approximately 10 minutes. The remaining TFA solution is removed and the column washed with H₂O followed by 1 CV 1M NaCl and additional H₂O. The siNA duplex product is then eluted, for example, using 1 CV 20% aqueous CAN.

[0494] FIG. 2 provides an example of MALDI-TOF mass spectrometry analysis of a purified siNA construct in which each peak corresponds to the calculated mass of an individual siNA strand of the siNA duplex. The same purified siNA provides three peaks when analyzed by capillary gel electrophoresis (CGE), one peak presumably corresponding to the duplex siNA, and two peaks presumably corresponding to the separate siNA sequence strands. Ion exchange HPLC analysis of the same siNA contract only shows a single peak. Testing of the purified siNA construct using a luciferase reporter assay described below demonstrated the same RNAI activity compared to siNA constructs generated from separately synthesized oligonucleotide sequence strands.

### Example 2

### Identification of Potential siNA Target Sites in any RNA Sequence

[0495] The sequence of an RNA target of interest, such as a viral or human mRNA transcript, is screened for target sites, for example by using a computer folding algorithm. In a non-limiting example, the sequence of a gene or RNA gene transcript derived from a database, such as Genbank, is used to generate siNA targets having complementarity to the target. Such sequences can be obtained from a database, or can be determined experimentally as known in the art. Target sites that are known, for example, those target sites determined to be effective target sites based on studies with other nucleic acid molecules, for example ribozymes or antisense, or those targets known to be associated with a disease or condition such as those sites containing mutations or deletions, can be used to design siNA molecules targeting those sites. Various parameters can be used to determine which sites are the most suitable target sites within the target RNA sequence. These parameters include but are not limited to secondary or tertiary RNA structure, the nucleotide base composition of the target sequence, the degree of homology between various regions of the target sequence, or the relative position of the target sequence within the RNA transcript. Based on these determinations, any number of target sites within the RNA transcript can be chosen to screen siNA molecules for efficacy, for example by using in vitro RNA cleavage assays, cell culture, or animal models. In a non-limiting example, anywhere from 1 to 1000 target sites are chosen within the transcript based on the size of the siNA construct to be used. High throughput screening assays can be developed for screening siNA molecules using methods known in the art, such as with multi-well or multi-plate assays to determine efficient reduction in target gene expression.

### Example 3

### Selection of siNA Molecule Target Sites in a RNA

[0496] The following non-limiting steps can be used to carry out the selection of siNAs targeting a given gene sequence or transcript.
[0497] 1. The target sequence is parsed in silico into a list of all fragments or subsequences of a particular length, for example 23 nucleotide fragments, contained within the target sequence. This step is typically carried out using a custom Perl script, but commercial sequence analysis programs such as Oligo, MacVector, or the GCG Wisconsin Package can be employed as well.
[0498] 2. In some instances the siNAs correspond to more than one target sequence; such would be the case for example in targeting different transcripts of the same gene, targeting different transcripts of more than one gene, or for targeting both the human gene and an animal homolog. In this case, a subsequence list of a particular length is generated for each of the targets, and then the lists are compared to find matching sequences in each list. The subsequences are then ranked according to the number of target sequences that contain the given subsequence; the goal is to find subsequences that are present in most or all of the target sequences. Alternately, the ranking can identify subsequences that are unique to a target sequence, such as a mutant target sequence. Such an approach would enable the use of siNA to target specifically the mutant sequence and not effect the expression of the normal sequence.
[0499] 3. In some instances the siNA subsequences are absent in one or more sequences while present in the desired target sequence; such would be the case if the siNA targets a gene with a paralogous family member that is to remain untargeted. As in case 2 above, a subsequence list of a particular length is generated for each of the targets, and then the lists are compared to find sequences that are present in the target gene but are absent in the untargeted paralog.
[0500] 4. The ranked siNA subsequences can be further analyzed and ranked according to GC content. A preference can be given to sites containing 30-70% GC, with a further preference to sites containing 40-60% GC.
[0501] 5. The ranked siNA subsequences can be further analyzed and ranked according to self-folding and internal hairpins. Weaker internal folds are preferred; strong hairpin structures are to be avoided.
[0502] 6. The ranked siNA subsequences can be further analyzed and ranked according to whether they have runs of GGG or CCC in the sequence. GGG (or even more Gs) in either strand can make oligonucleotide synthesis problematic and can potentially interfere with RNAI activity, so it is avoided whenever better sequences are available. CCC is searched in the target strand because that will place GGG in the antisense strand.
[0503] 7. The ranked siNA subsequences can be further analyzed and ranked according to whether they have the dinucleotide UU (uridine dinucleotide) on the 3′-end of the sequence, and/or AA on the 5′-end of the sequence (to yield 3′ UU on the antisense sequence). These sequences allow one to design siNA molecules with terminal TT thymidine dinucleotides.
[0504] 8. Four or five target sites are chosen from the ranked list of subsequences as described above. For example, in subsequences having 23 nucleotides, the right 21 nucleotides of each chosen 23-mer subsequence are then designed and synthesized for the upper (sense) strand of the siNA duplex, while the reverse complement of the left 21 nucleotides of each chosen 23-mer subsequence are then designed and synthesized for the lower (antisense) strand of the siNA duplex (see Tables II and III). If terminal TT residues are desired for the sequence (as described in paragraph 7), then the two 3′ terminal nucleotides of both the sense and antisense strands are replaced by TT prior to synthesizing the oligos.
[0505] 9. The siNA molecules are screened in an in vitro, cell culture or animal model system to identify the most active siNA molecule or the most preferred target site within the target RNA sequence.
[0506] 10. Other design considerations can be used when selecting target nucleic acid sequences, see, for example, Reynolds et al., 2004, Nature Biotechnology Advanced Online Publication, 1 Feb. 2004, doi:10.1038/nbt936 and Ui-Tei et al., 2004, Nucleic Acids Research, 32, doi: 10.1093/nar/gkh247.

[0507] In an alternate approach, a pool of siNA constructs specific to a VEGF and/or VEGFR target sequence is used to screen for target sites in cells expressing VEGF and/or VEGFR RNA, such as HUVEC, HMVEC, or A375 cells. The general strategy used in this approach is shown in FIG. 9. A non-limiting example of such is a pool comprising sequences having any of SEQ ID NOS 1-4248. Cells expressing VEGF and/or VEGFR (e.g., HUVEC, HMVEC, or A375 cells) are transfected with the pool of siNA constructs and cells that demonstrate a phenotype associated with VEGF and/or VEGFR inhibition are sorted. The pool of siNA constructs can be expressed from transcription cassettes inserted into appropriate vectors (see for example FIG. 7 and FIG. 8). The siNA from cells demonstrating a positive phenotypic change (e.g., decreased proliferation, decreased VEGF and/or VEGFR mRNA levels or decreased VEGF and/or VEGFR protein expression), are sequenced to determine the most suitable target site(s) within the target VEGF and/or VEGFR RNA sequence.

### Example 4

### VEGF and/or VEGFR Targeted siNA Design

[0508] siNA target sites were chosen by analyzing sequences of the VEGF and/or VEGFR RNA target and optionally prioritizing the target sites on the basis of folding (structure of any given sequence analyzed to determine siNA accessibility to the target), by using a library of siNA molecules as described in Example 3, or alternately by using an in vitro siNA system as described in Example 6 herein. siNA molecules were designed that could bind each target and are optionally individually analyzed by computer folding to assess whether the siNA molecule can interact with the target sequence. Varying the length of the siNA molecules can be chosen to optimize activity. Generally, a sufficient number of complementary nucleotide bases are chosen to bind to, or otherwise interact with, the target RNA, but the degree of complementarity can be modulated to accommodate siNA duplexes or varying length or base composition. By using such methodologies, siNA molecules can be designed to target sites within any known RNA sequence, for example those RNA sequences corresponding to the any gene transcript.

[0509] Chemically modified siNA constructs are designed to provide nuclease stability for systemic administration in vivo and/or improved pharmacokinetic, localization, and delivery properties while preserving the ability to mediate RNAi activity. Chemical modifications as described herein are introduced synthetically using synthetic methods described herein and those generally known in the art. The synthetic siNA constructs are then assayed for nuclease stability in serum and/or cellular/tissue extracts (e.g. liver extracts). The synthetic siNA constructs are also tested in parallel for RNAi activity using an appropriate assay, such as a luciferase reporter assay as described herein or another suitable assay that can quantity RNAi activity. Synthetic siNA constructs that possess both nuclease stability and RNAi activity can be further modified and re-evaluated in stability and activity assays. The chemical modifications of the stabilized active siNA constructs can then be applied to any siNA sequence targeting any chosen RNA and used, for example, in target screening assays to pick lead siNA compounds for therapeutic development (see for example FIG. 11).

### Example 5

### Chemical Synthesis and Purification of siNA

[0510] siNA molecules can be designed to interact with various sites in the RNA message, for example, target sequences within the RNA sequences described herein. The sequence of one strand of the siNA molecule(s) is complementary to the target site sequences described above. The siNA molecules can be chemically synthesized using methods described herein. Inactive siNA molecules that are used as control sequences can be synthesized by scrambling the sequence of the siNA molecules such that it is not complementary to the target sequence. Generally, siNA constructs can by synthesized using solid phase oligonucleotide synthesis methods as described herein (see for example Usman et al., U.S. Pat. Nos. 5,804,683; 5,831,071; 5,998,203; 6,117,657; 6,353,098; 6,362,323; 6,437,117; 6,469,158; Scaringe et al., U.S. Pat. Nos. 6,111,086; 6,008,400; 6,111,086 all incorporated by reference herein in their entirety).

[0511] In a non-limiting example, RNA oligonucleotides are synthesized in a stepwise fashion using the phosphoramidite chemistry as is known in the art. Standard phosphoramidite chemistry involves the use of nucleosides comprising any of 5′-O-dimethoxytrityl, 2′-O-tert-butyldimethylsilyl, 3′-O-2-Cyanoethyl N,N-diisopropylphos-phoroamidite groups, and exocyclic amine protecting groups (e.g. N6-benzoyl adenosine, N4 acetyl cytidine, and N2-isobutyryl guanosine). Alternately, 2′-O-Silyl Ethers can be used in conjunction with acid-labile 2′-O-orthoester protecting groups in the synthesis of RNA as described by Scaringe supra. Differing 2′ chemistries can require different protecting groups, for example 2′-deoxy-2′-amino nucleosides can utilize N-phthaloyl protection as described by Usman et al., U.S. Pat. No. 5,631,360, incorporated by reference herein in its entirety).

[0512] During solid phase synthesis, each nucleotide is added sequentially (3′- to 5′-direction) to the solid support-bound oligonucleotide. The first nucleoside at the 3′-end of the chain is covalently attached to a solid support (e.g., controlled pore glass or polystyrene) using various linkers. The nucleotide precursor, a ribonucleoside phosphoramidite, and activator are combined resulting in the coupling of the second nucleoside phosphoramidite onto the 5′-end of the first nucleoside. The support is then washed and any unreacted 5′-hydroxyl groups are capped with a capping reagent such as acetic anhydride to yield inactive 5′-acetyl moieties. The trivalent phosphorus linkage is then oxidized to a more stable phosphate linkage. At the end of the nucleotide addition cycle, the 5′-O-protecting group is cleaved under suitable conditions (e.g., acidic conditions for trityl-based groups and Fluoride for silyl-based groups). The cycle is repeated for each subsequent nucleotide.

[0513] Modification of synthesis conditions can be used to optimize coupling efficiency, for example by using differing coupling times, differing reagent/phosphoramidite concentrations, differing contact times, differing solid supports and solid support linker chemistries depending on the particular chemical composition of the siNA to be synthesized. Deprotection and purification of the siNA can be performed as is generally described in Usman et al., U.S. Pat. No. 5,831,071, U.S. Pat. No. 6,353,098, U.S. Pat. No. 6,437,117, and Bellon et al., U.S. Pat. No. 6,054,576, U.S. Pat. No. 6,162,909, U.S. Pat. No. 6,303,773, or Scaringe supra, incorporated by reference herein in their entireties. Additionally, deprotection conditions can be modified to provide the best possible yield and purity of siNA constructs. For example, applicant has observed that oligonucleotides comprising 2′-deoxy-2′-fluoro nucleotides can degrade under inappropriate deprotection conditions. Such oligonucleotides are deprotected using aqueous methylamine at about 35° C. for 30 minutes. If the 2′-deoxy-2′-fluoro containing oligonucleotide also comprises ribonucleotides, after deprotection with aqueous methylamine at about 35° C. for 30 minutes, TEA-HF is added and the reaction maintained at about 65° C. for an additional 15 minutes.

### Example 6

### RNAi In Vitro Assay to Assess siNA Activity

[0514] An in vitro assay that recapitulates RNAi in a cell-free system is used to evaluate siNA constructs targeting VEGF and/or VEGFR RNA targets. The assay comprises the system described by Tuschl et al., 1999, Genes and Development, 13, 3191-3197 and Zamore et al., 2000, Cell, 101, 25-33 adapted for use with VEGF and/or VEGFR target RNA. A Drosophila extract derived from syncytial blastoderm is used to reconstitute RNAi activity in vitro. Target RNA is generated via in vitro transcription from an appropriate VEGF and/or VEGFR expressing plasmid using T7 RNA polymerase or via chemical synthesis as described herein. Sense and antisense siNA strands (for example 20 uM each) are annealed by incubation in buffer (such as 100 mM potassium acetate, 30 mM HEPES-KOH, pH 7.4, 2 mM magnesium acetate) for 1 minute at 90° C. followed by 1 hour at 37° C., then diluted in lysis buffer (for example 100 mM potassium acetate, 30 mM HEPES-KOH at pH 7.4, 2 mM magnesium acetate). Annealing can be monitored by gel electrophoresis on an agarose gel in TBE buffer and stained with ethidium bromide. The Drosophila lysate is prepared using zero to two-hour-old embryos from Oregon R flies collected on yeasted molasses agar that are dechorionated and lysed. The lysate is centrifuged and the supernatant isolated. The assay comprises a reaction mixture containing 50% lysate [vol/vol], RNA (10-50 pM final concentration), and 10% [vol/vol] lysis buffer containing siNA (10 nM final concentration). The reaction mixture also contains 10 mM creatine phosphate, 10 ug/ml creatine phosphokinase, 100 um GTP, 100 uM UTP, 100 uM CTP, 500 uM ATP, 5 mM DTT, 0.1 U/uL RNasin (Promega), and 100 uM of each amino acid. The final concentration of potassium acetate is adjusted to 100 mM. The reactions are pre-assembled on ice and preincubated at 25° C. for 10 minutes before adding RNA, then incubated at 25° C. for an additional 60 minutes. Reactions are quenched with 4 volumes of 1.25× Passive Lysis Buffer (Promega). Target RNA cleavage is assayed by RT-PCR analysis or other methods known in the art and are compared to control reactions in which siNA is omitted from the reaction.

[0515] Alternately, internally-labeled target RNA for the assay is prepared by in vitro transcription in the presence of [alpha-³²P] CTP, passed over a G50 Sephadex column by spin chromatography and used as target RNA without further purification. Optionally, target RNA is 5′-³²P-end labeled using T4 polynucleotide kinase enzyme. Assays are performed as described above and target RNA and the specific RNA cleavage products generated by RNAi are visualized on an autoradiograph of a gel. The percentage of cleavage is determined by PHOSPHOR IMAGER® (autoradiography) quantitation of bands representing intact control RNA or RNA from control reactions without siNA and the cleavage products generated by the assay.

[0516] In one embodiment, this assay is used to determine target sites in the VEGF and/or VEGFR RNA target for siNA mediated RNAi cleavage, wherein a plurality of siNA constructs are screened for RNAi mediated cleavage of the VEGF and/or VEGFR RNA target, for example, by analyzing the assay reaction by electrophoresis of labeled target RNA, or by northern blotting, as well as by other methodology well known in the art.

### Example 7

### Nucleic Acid Inhibition of VEGF and/or VEGFR Target RNA In Vivo

[0517] siNA molecules targeted to the human VEGF and/or VEGFR RNA are designed and synthesized as described above. These nucleic acid molecules can be tested for cleavage activity in vivo, for example, using the following procedure. The target sequences and the nucleotide location within the VEGF and/or VEGFR RNA are given in Table II and III.

[0518] Two formats are used to test the efficacy of siNAs targeting VEGF and/or VEGFR. First, the reagents are tested in cell culture using, for example, HUVEC, HMVEC, or A375 cells to determine the extent of RNA and protein inhibition. siNA reagents (e.g.; see Tables II and III) are selected against the VEGF and/or VEGFR target as described herein. RNA inhibition is measured after delivery of these reagents by a suitable transfection agent to, for example, HUVEC, HMVEC, or A375 cells. Relative amounts of target RNA are measured versus actin using real-time PCR monitoring of amplification (eg., ABI 7700 TAQMAN®). A comparison is made to a mixture of oligonucleotide sequences made to unrelated targets or to a randomized siNA control with the same overall length and chemistry, but randomly substituted at each position. Primary and secondary lead reagents are chosen for the target and optimization performed. After an optimal transfection agent concentration is chosen, a RNA time-course of inhibition is performed with the lead siNA molecule. In addition, a cell-plating format can be used to determine RNA inhibition.

Delivery of siNA to Cells

[0519] Cells (e.g., HUVEC, HMVEC, or A375 cells) are seeded, for example, at 1×10⁵ cells per well of a six-well dish in EGM-2 (BioWhittaker) the day before transfection. siNA (final concentration, for example 20 nM) and cationic lipid (e.g., final concentration 2 μg/ml) are complexed in EGM basal media (Biowhittaker) at 37° C. for 30 minutes in polystyrene tubes. Following vortexing, the complexed siNA is added to each well and incubated for the times indicated. For initial optimization experiments, cells are seeded, for example, at 1×10³ in 96 well plates and siNA complex added as described. Efficiency of delivery of siNA to cells is determined using a fluorescent siNA complexed with lipid. Cells in 6-well dishes are incubated with siNA for 24 hours, rinsed with PBS and fixed in 2% paraformaldehyde for 15 minutes at room temperature. Uptake of siNA is visualized using a fluorescent microscope.

TAQMAN® (Real-Time PCR Monitoring of Amplification) and Lightcycler Quantification of mRNA

[0520] Total RNA is prepared from cells following siNA delivery, for example, using Qiagen RNA purification kits for 6-well or Rneasy extraction kits for 96-well assays. For TAQMAN® analysis (real-time PCR monitoring of amplification), dual-labeled probes are synthesized with the reporter dye, FAM or JOE, covalently linked at the 5′-end and the quencher dye TAMRA conjugated to the 3′-end. One-step RT-PCR amplifications are performed on, for example, an ABI PRISM 7700 Sequence Detector using 50 μl reactions consisting of 10 μl total RNA, 100 nM forward primer, 900 nM reverse primer, 100 nM probe, 1× TaqMan PCR reaction buffer (PE-Applied Biosystems), 5.5 mM MgCl₂, 300 μM each dATP, dCTP, dGTP, and dTTP, 10U RNase Inhibitor (Promega), 1.25U AMPLITAQ GOLD® (DNA polymerase) (PE-Applied Biosystems) and 10U M-MLV Reverse Transcriptase (Promega). The thermal cycling conditions can consist of 30 minutes at 48° C., 10 minutes at 95° C., followed by 40 cycles of 15 seconds at 95° C. and 1 minute at 60° C. Quantitation of mRNA levels is determined relative to standards generated from serially diluted total cellular RNA (300, 100, 33, 11 ng/reaction) and normalizing to β-actin or GAPDH mRNA in parallel TAQMAN® reactions (real-time PCR monitoring of amplification). For each gene of interest an upper and lower primer and a fluorescently labeled probe are designed. Real time incorporation of SYBR Green I dye into a specific PCR product can be measured in glass capillary tubes using a lightcyler. A standard curve is generated for each primer pair using control cRNA. Values are represented as relative expression to GAPDH in each sample.

Western Blotting

[0521] Nuclear extracts can be prepared using a standard micro preparation technique (see for example Andrews and Faller, 1991, Nucleic Acids Research, 19, 2499). Protein extracts from supernatants are prepared, for example using TCA precipitation. An equal volume of 20% TCA is added to the cell supernatant, incubated on ice for 1 hour and pelleted by centrifugation for 5 minutes. Pellets are washed in acetone, dried and resuspended in water. Cellular protein extracts are run on a 10% Bis-Tris NuPage (nuclear extracts) or 4-12% Tris-Glycine (supernatant extracts) polyacrylamide gel and transferred onto nitro-cellulose membranes. Non-specific binding can be blocked by incubation, for example, with 5% non-fat milk for 1 hour followed by primary antibody for 16 hour at 4° C. Following washes, the secondary antibody is applied, for example (1:10,000 dilution) for 1 hour at room temperature and the signal detected with SuperSignal reagent (Pierce).

### Example 8

### Animal Models Useful to Evaluate the Down-Regulation of VEGF and/or VEGFR Gene Expression

[0522] There are several animal models in which the anti-angiogenesis effect of nucleic acids of the present invention, such as siRNA, directed against VEGF, VEGFR1, VEGFR2 and/or VEGFR3 mRNAs can be tested. Typically a corneal model has been used to study angiogenesis in rat and rabbit since recruitment of vessels can easily be followed in this normally avascular tissue (Pandey et al., 1995 Science 268: 567-569). In these models, a small Teflon or Hydron disk pretreated with an angiogenesis factor (e.g. bFGF or VEGF) is inserted into a pocket surgically created in the cornea. Angiogenesis is monitored 3 to 5 days later. siRNA directed against VEGF, VEGFR1, VEGFR2 and/or VEGFR3 mRNAs are delivered in the disk as well, or dropwise to the eye over the time course of the experiment. In another eye model, hypoxia has been shown to cause both increased expression of VEGF and neovascularization in the retina (Pierce et al., 1995 Proc. Natl. Acad. Sci. USA. 92: 905-909; Shweiki et al., 1992 J. Clin. Invest. 91: 2235-2243).

[0523] In human glioblastomas, it has been shown that VEGF is at least partially responsible for tumor angiogenesis (Plate et al., 1992 Nature 359, 845). Animal models have been developed in which glioblastoma cells are implanted subcutaneously into nude mice and the progress of tumor growth and angiogenesism is studied (Kim et al., 1993 supra; Millauer et al., 1994 supra).

[0524] Another animal model that addresses neovascularization involves Matrigel, an extract of basement membrane that becomes a solid gel when injected subcutaneously (Passaniti et al., 1992 Lab. Invest. 67: 519-528). When the Matrigel is supplemented with angiogenesis factors such as VEGF, vessels grow into the Matrigel over a period of 3 to 5 days and angiogenesis can be assessed. Again, nucleic acids directed against VEGFR mRNAs are delivered in the Matrigel.

[0525] Several animal models exist for screening of anti-angiogenic agents. These include corneal vessel formation following corneal injury (Burger et al., 1985 Cornea 4: 35-41; Lepri, et al., 1994 J. Ocular Pharmacol. 10: 273-280; Ormerod et al., 1990 Am. J. Pathol. 137: 1243-1252) or intracorneal growth factor implant (Grant et al., 1993 Diabetologia 36: 282-291; Pandey et al. 1995 supra; Zieche et al., 1992 Lab. Invest. 67: 711-715), vessel growth into Matrigel matrix containing growth factors (Passaniti et al., 1992 supra), female reproductive organ neovascularization following hormonal manipulation (Shweiki et al., 1993 Clin. Invest. 91: 2235-2243), several models involving inhibition of tumor growth in highly vascularized solid tumors (O'Reilly et al., 1994 Cell 79: 315-328; Senger et al., 1993 Cancer and Metas. Rev. 12: 303-324; Takahasi et al., 1994 Cancer Res. 54: 4233-4237; Kim et al., 1993 supra), and transient hypoxia-induced neovascularization in the mouse retina (Pierce et al., 1995 Proc. Natl. Acad. Sci. USA. 92: 905-909). Other model systems to study tumor angiogenesis are reviewed by Folkman, 1985 Adv. Cancer. Res. 43, 175.

Ocular Models of Angiogenesis

[0526] The cornea model, described in Pandey et al. supra, is the most common and well characterized model for screening anti-angiogenic agent efficacy. This model involves an avascular tissue into which vessels are recruited by a stimulating agent (growth factor, thermal or alkalai burn, endotoxin). The corneal model utilizes the intrastromal corneal implantation of a Teflon pellet soaked in a VEGF-Hydron solution to recruit blood vessels toward the pellet, which can be quantitated using standard microscopic and image analysis techniques. To evaluate their anti-angiogenic efficacy, nucleic acids are applied topically to the eye or bound within Hydron on the Teflon pellet itself. This avascular cornea as well as the Matrigel (see below) provide for low background assays. While the corneal model has been performed extensively in the rabbit, studies in the rat have also been conducted.

[0527] The mouse model (Passaniti et al., supra) is a non-tissue model that utilizes Matrigel, an extract of basement membrane (Kleinman et al., 1986) or Millipore® filter disk, which can be impregnated with growth factors and anti-angiogenic agents in a liquid form prior to injection. Upon subcutaneous administration at body temperature, the Matrigel or Millipore® filter disk forms a solid implant. VEGF embedded in the Matrigel or Millipore® filter disk is used to recruit vessels within the matrix of the Matrigel or Millipore® filter disk which can be processed histologically for endothelial cell specific vWF (factor VIII antigen) immunohistochemistry, Trichrome-Masson stain, or hemoglobin content. Like the cornea, the Matrigel or Millipore® filter disk is avascular; however, it is not tissue. In the Matrigel or Millipore® filter disk model, nucleic acids are administered within the matrix of the Matrigel or Millipore® filter disk to test their anti-angiogenic efficacy. Thus, delivery issues in this model, as with delivery of nucleic acids by Hydron-coated Teflon pellets in the rat cornea model, may be less problematic due to the homogeneous presence of the nucleic acid within the respective matrix.

[0528] Additionally, siNA molecules of the invention targeting VEGF and/or VEGFR (e.g. VEGFR1, VEGFR2, and/or VEGFR3) can be assesed for activity transgenic mice to determine whether modulation of VEGF and/or VEGFR can inhibit optic neovasculariation. Animal models of choroidal neovascularization are described in, for exmaple, Mori et al., 2001, Journal of Cellular Physiology, 188, 253; Mori et al., 2001, American Journal of Pathology, 159, 313; Ohno-Matsui et al., 2002, American Journal of Pathology, 160, 711; and Kwak et al., 2000, Investigative Ophthalmology & Visual Science, 41, 3158. VEGF plays a central role in causing retinal neovascularization. Increased expression of VEGFR2 in retinal photoreceptors of transgenic mice stimulates neovascularization within the retina, and a blockade of VEGFR2 signaling has been shown to inhibit retinal choroidal neovascularization (CNV) (Mori et al., 2001, J. Cell. Physiol., 188, 253).

[0529] CNV is laser induced in, for example, adult C57BL/6 mice. The mice are also given an intravitreous, periocular or a subretinal injection of VEGF and/or VEGFR (e.g., VEGFR2) siNA in each eye. Intravitreous injections are made using a Harvard pump microinjection apparatus and pulled glass micropipets. Then a micropipette is passed through the sclera just behind the limbus into the vitreous cavity. The subretinal injections are made using a condensing lens system on a dissecting microscope. The pipet tip is then passed through the sclera posterior to the limbus and positioned above the retina. Five days after the injection of the vector the mice are anesthetized with ketamine hydrochloride (100 mg/kg body weight), 1% tropicamide is also used to dilate the pupil, and a diode laser photocoagulation is used to rupture Bruch's membrane at three locations in each eye. A slit lamp delivery system and a hand-held cover slide are used for laser photocoagulation. Burns are made in the 9, 12, and 3 o'clock positions 2-3 disc diameters from the optic nerve (Mori et al., supra).

[0530] The mice typically develop subretinal neovasculariation due to the expression of VEGF in photoreceptors beginning at prenatal day 7. At prenatal day 21, the mice are anesthetized and perfused with 1 ml of phosphate-buffered saline containing 50 mg/ml of fluorescein-labeled dextran. Then the eyes are removed and placed for 1 hour in a 10% phosphate-buffered formalin. The retinas are removed and examined by fluorescence microscopy (Mori et al., supra).

[0531] Fourteen days after the laser induced rupture of Bruch's membrane, the eyes that received intravitreous and subretinal injection of siNA are evaluated for smaller appearing areas of CNV, while control eyes are evaluated for large areas of CNV. The eyes that receive intravitreous injections or a subretinal injection of siNA are also evaluated for fewer areas of neovasculariation on the outer surface of the retina and potenial abortive sprouts from deep retinal capillaries that do not reach the retinal surface compared to eyes that did not receive an injection of siNA.

Tumor Models of Angiogenesis

Use of Murine Models

[0532] For a typical systemic study involving 10 mice (20 g each) per dose group, 5 doses (1, 3, 10, 30 and 100 mg/kg daily over 14 days continuous administration), approximately 400 mg of siRNA, formulated in saline is used. A similar study in young adult rats (200 g) requires over 4 g. Parallel pharmacokinetic studies involve the use of similar quantities of siRNA further justifying the use of murine models.

Lewis Lung Carcinoma and B-16 Melanoma Murine Models

[0533] Identifying a common animal model for systemic efficacy testing of nucleic acids is an efficient way of screening siNA for systemic efficacy.

[0534] The Lewis lung carcinoma and B-16 murine melanoma models are well accepted models of primary and metastatic cancer and are used for initial screening of anti-cancer agents. These murine models are not dependent upon the use of immunodeficient mice, are relatively inexpensive, and minimize housing concerns. Both the Lewis lung and B-16 melanoma models involve subcutaneous implantation of approximately 10⁶ tumor cells from metastatically aggressive tumor cell lines (Lewis lung lines 3LL or D122, LLc-LN7; B-16-BL6 melanoma) in C57BL/6J mice. Alternatively, the Lewis lung model can be produced by the surgical implantation of tumor spheres (approximately 0.8 mm in diameter). Metastasis also can be modeled by injecting the tumor cells directly intravenously. In the Lewis lung model, microscopic metastases can be observed approximately 14 days following implantation with quantifiable macroscopic metastatic tumors developing within 21-25 days. The B-16 melanoma exhibits a similar time course with tumor neovascularization beginning 4 days following implantation. Since both primary and metastatic tumors exist in these models after 21-25 days in the same animal, multiple measurements can be taken as indices of efficacy. Primary tumor volume and growth latency as well as the number of micro- and macroscopic metastatic lung foci or number of animals exhibiting metastases can be quantitated. The percent increase in lifespan can also be measured. Thus, these models provide suitable primary efficacy assays for screening systemically administered siRNA nucleic acids and siRNA nucleic acid formulations.

[0535] In the Lewis lung and B-16 melanoma models, systemic pharmacotherapy with a wide variety of agents usually begins 1-7 days following tumor implantation/inoculation with either continuous or multiple administration regimens. Concurrent pharmacokinetic studies can be performed to determine whether sufficient tissue levels of siRNA can be achieved for pharmacodynamic effect to be expected. Furthermore, primary tumors and secondary lung metastases can be removed and subjected to a variety of in vitro studies (i.e. target RNA reduction).

Renal Disease Models

[0536] In addition, animal models are useful in screening compounds, eg. siNA molecules, for efficacy in treating renal failure, such as a result of autosomal dominant polycystic kidney disease (ADPKD). The Han:SPRD rat model, mice with a targeted mutation in the Pkd2 gene and congenital polycystic kidney (cpk) mice, closely resemble human ADPKD and provide animal models to evaluate the therapeutic effect of siRNA constructs that have the potential to interfere with one or more of the pathogenic elements of ADPKD mediated renal failure, such as angiogenesis. Angiogenesis may be necessary in the progression of ADPKD for growth of cyst cells as well as increased vascular permeability promoting fluid secretion into cysts. Proliferation of cystic epithelium is also a feature of ADPKD because cyst cells in culture produce soluble vascular endothelial growth factor (VEGF). VEGFR1 has also been detected in epithelial cells of cystic tubules but not in endothelial cells in the vasculature of cystic kidneys or normal kidneys. VEGFR2 expression is increased in endothelial cells of cyst vessels and in endothelial cells during renal ischemia-reperfusion. It is proposed that inhibition of VEGF receptors with anti-VEGFR1 and anti-VEGFR2 siRNA molecules would attenuate cyst formation, renal failure and mortality in ADPKD. Anti-VEGFR2 siRNA molecules would therefore be designed to inhibit angiogenesis involved in cyst formation. As VEGFR1 is present in cystic epithelium and not in vascular endothelium of cysts, it is proposed that anti-VEGFR1 siRNA molecules would attenuate cystic epithelial cell proliferation and apoptosis which would in turn lead to less cyst formation. Further, it is proposed that VEGF produced by cystic epithelial cells is one of the stimuli for angiogenesis as well as epithelial cell proliferation and apoptosis. The use of Han:SPRD rats (see for eaxmple Kaspareit-Rittinghausen et al., 1991, Am. J. Pathol. 139, 693-696), mice with a targeted mutation in the Pkd2 gene (Pkd2−/− mice, see for example Wu et al., 2000, Nat. Genet. 24, 75-78) and cpk mice (see for example Woo et al., 1994, Nature, 368, 750-753) all provide animal models to study the efficacy of siRNA molecles of the invention against VEGFR1 and VEGFR2 mediated renal failure.

[0537] VEGF, VEGFR1 VGFR2 and/or VEGFR3 protein levels can be measured clinically or experimentally by FACS analysis. VEGF, VEGFR1 VGFR2 and/or VEGFR3 encoded mRNA levels are assessed by Northern analysis, RNase-protection, primer extension analysis and/or quantitative RT-PCR. siRNA nucleic acids that block VEGF, VEGFR1 VGFR2 and/or VEGFR3 protein encoding mRNAs and therefore result in decreased levels of VEGF, VEGFR1 VGFR2 and/or VEGFR3 activity by more than 20% in vitro can be identified.

Respiratory Disease Models

[0538] Exaggerated levels of VEGF are present in subjects with asthma, but the role of VEGF in normal and asthmatic lungs has not been well defined. Lee et al., 2004, Nature Medicine, 10, 1095-1103, generated lung-targeted VEGF165 transgenic mice and evaluated the role of VEGF in T-helper type 2 cell (TH2)-mediated inflammation in the lungs of these animals. In these mice, VEGF induced, through IL-13-dependent and independent pathways, an asthma-like phenotype characterized by inflammation, parenchymal and vascular remodeling, edema, mucus metaplasia, myocyte hyperplasia and airway hyper-responsiveness. VEGF was also found to enhance respiratory antigen sensitization and TH2 inflammation and increased the number of activated DC2 dendritic cells in the mice. In antigen-induced inflammation, VEGF was produced predominantly by epithelial cells and preferentially by TH2 as opposed to TH1 cells. In this setting, VEGF demonstrated a critical role in TH2 inflammation, cytokine production and physiologic dysregulation. Thus, VEGF is a mediator of vascular and extravascular remodeling, inflammation, and vascular permeability/edema that enhances antigen sensitization and is crucial in adaptive TH2 inflammation. Disruption of VEGF is therefore expected to be of therapeutic significance in the treatment of asthma and other TH2 disorders. The transgenic mice described by Lee et al., 2004, Nature Medicine, 10, 1095-1103 can be used in preclinical models of asthma and other respiratory diseases that ulitize treatment of such mice with siNA molecules of the invention, for example via pulmonary delivery approaches as a known in the art to evaluate the efficacy of siNA molecules in the treatment of repiratory disease. Such studies would be useful in the pre-clinical setting to establish parameters of use in treating human subjects.

[0539] Other animal models are useful in evaluating siNA molecules of the invention in the treatment of respiratory disease. For example, Kuperman et al., 2002, Nature Medicine, 8, 885-9, describe an animal model of IL-13 mediated asthma response animal models of allergic asthma in which blockade of IL-13 markedly inhibits allergen-induced asthma. Venkayya et al., 2002, Am J Respir Cell Mol. Biol., 26, 202-8 and Yang et al., 2001, Am J Respir Cell Mol. Biol., 25, 522-30 describe animal models of airway inflammation and airway hyperresponsiveness (AHR) in which IL-4/IL-4R and IL-13 mediate asthma. These models can be used to evaluate the efficacy of siNA molecules of the invention targeting, for example, IL-4, IL-4R, IL-13, and/or IL-13R for use is treating asthma.

### Example 9

### RNAi Mediated Inhibition of VEGFR Expression in Cell Culture

Inhibition of VEGFR1 RNA Expression Using siNA Targeting VEGFR1 RNA

[0540] siNA constructs (Table III) are tested for efficacy in reducing VEGF and/or VEGFR RNA expression in, for example, HUVEC, HMVEC, or A375 cells. Cells are plated approximately 24 hours before transfection in 96-well plates at 5,000-7,500 cells/well, 100 μl/well, such that at the time of transfection cells are 70-90% confluent. For transfection, annealed siNAs are mixed with the transfection reagent (Lipofectamine 2000, Invitrogen) in a volume of 50 μl/well and incubated for 20 min. at room temperature. The siNA transfection mixtures are added to cells to give a final siNA concentration of 25 nM in a volume of 150 μl. Each siNA transfection mixture is added to 3 wells for triplicate siNA treatments. Cells are incubated at 37° for 24h in the continued presence of the siNA transfection mixture. At 24h, RNA is prepared from each well of treated cells. The supernatants with the transfection mixtures are first removed and discarded, then the cells are lysed and RNA prepared from each well. Target gene expression following treatment is evaluated by RT-PCR for the target gene and for a control gene (36B4, an RNA polymerase subunit) for normalization. The triplicate data is averaged and the standard deviations determined for each treatment. Normalized data are graphed and the percent reduction of target mRNA by active siNAs in comparison to their respective inverted control siNAs is determined.

[0541] FIG. 22 shows a non-limiting example of reduction of VEGFR1 mRNA in A375 cells mediated by chemically-modified siNAs that target VEGFR1 mRNA. A549 cells were transfected with 0.25 ug/well of lipid complexed with 25 nM siNA. A screen of siNA constructs (Stabilization “Stab” chemistries are shown in Table IV, constructs are referred to by RPI number, see Table III) comprising Stab 4/5 chemistry (Sirna/RPI 31190/31193), Stab 1/2 chemistry (Sirna/RPI 31183/31186 and Sirna/RPI 31184/31187), and unmodified RNA (Sirna/RPI 30075/30076) were compared to untreated cells, matched chemistry inverted control siNA constructs (Sirna/RPI 31208/31211, Sirna/RPI 31201/31204, Sirna/RPI 31202/31205, and Sirna/RPI 30077/30078), scrambled siNA control constructs (Scram1 and Scram2), and cells transfected with lipid alone (transfection control). As shown in the figure, all of the siNA constructs significantly reduce VEGFR1 RNA expression. Additional stabilization chemistries as described in Table IV are similarly assayed for activity. These siNA constructs are compared to appropriate matched chemistry inverted controls. In addition, the siNA constructs are also compared to untreated cells, cells transfected with lipid and scrambled siNA constructs, and cells transfected with lipid alone (transfection control).

[0542] FIG. 23 shows a non-limiting example of reduction of VEGFR1 mRNA levels in HAEC cell culture using Stab 9/10 directed against eight sites in VEGFR1 mRNA compared to matched chemistry inverted controls siNA constructs. Controls UNT and LF2K refer to untreated cells and cells treated with LF2K transfection reagent alone, respectively.

Inhibition of VEGFR2 RNA Expression Using siNA Targeting VEGFR2 RNA

[0543] siNA constructs (Table III) are tested for efficacy in reducing VEGF and/or VEGFR RNA expression in, for example, HUVEC, HMVEC, or A375 cells. Cells are plated approximately 24 hours before transfection in 96-well plates at 5,000-7,500 cells/well, 100 μl/well, such that at the time of transfection cells are 70-90% confluent. For transfection, annealed siNAs are mixed with the transfection reagent (Lipofectamine 2000, Invitrogen) in a volume of 50 μl/well and incubated for 20 min. at room temperature. The siNA transfection mixtures are added to cells to give a final siNA concentration of 25 nM in a volume of 150 μl. Each siNA transfection mixture is added to 3 wells for triplicate siNA treatments. Cells are incubated at 37° for 24h in the continued presence of the siNA transfection mixture. At 24h, RNA is prepared from each well of treated cells. The supernatants with the transfection mixtures are first removed and discarded, then the cells are lysed and RNA prepared from each well. Target gene expression following treatment is evaluated by RT-PCR for the target gene and for a control gene (36B4, an RNA polymerase subunit) for normalization. The triplicate data is averaged and the standard deviations determined for each treatment. Normalized data are graphed and the percent reduction of target mRNA by active siNAs in comparison to their respective inverted control siNAs is determined.

[0544] FIG. 24 shows a non-limiting example of reduction of VEGFR2 mRNA in HAEC cells mediated by chemically-modified siNAs that target VEGFR2 mRNA. HAEC cells were transfected with 0.25 ug/well of lipid complexed with 25 nM siNA. A screen of siNA constructs (Stabilization “Stab” chemistries are shown in Table IV, constructs are referred to by Compound No., see Table III) in site 3854 comprising Stab 4/5 chemistry (Compound No. 30786/30790), Stab 7/8 chemistry (Compound No. 31858/31860), and Stab 9/10 chemistry (Compound No. 31862/31864) and in site 3948 comprising Stab 4/5 chemistry (Compound No. 31856/31857), Stab 7/8 chemistry (Compound No. 31859/31861), and Stab 9/10 chemistry (Compound No. 31863/31865) were compared to untreated cells, matched chemistry inverted control siNA constructs in site 3854 (Compound No. 31878/31880, Compound No. 31882/31884, and Compound No. 31886/31888) and in site 3948 (Compound No. 31879/31881, Compound No. 31883/31885, and Compound No. 31887/31889), and cells transfected with LF2K (transfection reagent), and an all RNA control (Compound No. 31435/31439 in site 3854 and Compound No. 31437/31441 in site 3948). As shown in the figure, all of the siNA constructs significantly reduce VEGFR2 RNA expression. Additional stabilization chemistries as described in Table IV are similarly assayed for activity. These siNA constructs are compared to appropriate matched chemistry inverted controls. In addition, the siNA constructs are also compared to untreated cells, cells transfected with lipid and scrambled siNA constructs, and cells transfected with lipid alone (transfection control).

[0545] FIG. 25 shows a non-limiting example of reduction of VEGFR2 mRNA levels in HAEC cell culture using Stab 0/0 directed against four sites in VEGFR2 mRNA compared to irrelevant control siNA constructs (IC1, IC2). Controls UNT and LF2K refer to untreated cells and cells treated with LF2K transfection reagent alone, respectively.

Inhibition of VEGFR1 and VEGFR2 RNA Expression Using siNA Targeting VEGFR1 and VEGFR2 Homologous RNA Sequences

[0546] VEGFR1 and VEGFR2 RNA levels were assessed in HAEC cells 24 hours after treatment with siNA molecules targeting sequences having VEGFR1 and VEGFR2 homology. HAEC cells were transfected with 1.5 ug/well of lipid complexed with 25 nM siNA. Activity of the siNA moleclues is shown compared to matched chemistry inverted siNA controls, untreated cells, and cells treated with lipid only (transfection control). siNA molecules and controls are referred to by compound numbers (sense/antisense), see Table III for sequences. As shown in FIGS. 26A and B, siNA constructs that target both VEGFR1 and VEGFR2 sequences demonstrate potent efficacy in inhibiting VEGFR1 expression in cell cuture experiments. As shown in FIGS. 27A and B, siNA constructs that target both VEGFR1 and VEGFR2 sequences demonstrate potent efficacy in inhibiting VEGFR2 expression in cell cuture experiments.

### Example 10

### siNA-Mediated Inhibition of Angiogenesis In Vivo

Evaluation of siNA Molecules in the Rat Cornea Model of VEGF Induced Angiogenesis

[0547] The purpose of this study was to assess the anti-angiogenic activity of siNA targeted against VEGFR1, using the rat cornea model of VEGF induced angiogenesis. The siNA molecules referred to in FIG. 28 have matched inverted controls which are inactive since they are not able to interact with the RNA target. The siNA molecules and VEGF were co-delivered using the filter disk method. Nitrocellulose filter disks (Millipore®) of 0.057 diameter were immersed in appropriate solutions and were surgically implanted in rat cornea as described by Pandey et al., supra.

[0548] The stimulus for angiogenesis in this study was the treatment of the filter disk with 30 μM VEGF, which is implanted within the cornea's stroma. This dose yields reproducible neovascularization stemming from the pericorneal vascular plexus growing toward the disk in a dose-response study 5 days following implant. Filter disks treated only with the vehicle for VEGF show no angiogenic response. The siNA were co-adminstered with VEGF on a disk in three different siNA concentrations. One concern with the simultaneous administration is that the siNA would not be able to inhibit angiogenesis since VEGF receptors can be stimulated. However, Applicant has observed that in low VEGF doses, the neovascular response reverts to normal suggesting that the VEGF stimulus is essential for maintaining the angiogenic response. Blocking the production of VEGF receptors using simultaneous administration of anti-VEGF-R mRNA siNA could attenuate the normal neovascularization induced by the filter disk treated with VEGF.

Materials and Methods:

Test Compounds and Controls

[0549] R&D Systems VEGF, carrier free at 75 μM in 82 mM Tris-Cl, pH 6.9
[0550] Active siNA constructs and inverted controls (Table III)
   Animals
[0551] Harlan Sprague-Dawley Rats, Approximately 225-250 g
[0552] 45 males, 5 animals per group.
   Husbandry

[0553] Animals are housed in groups of two. Feed, water, temperature and humidity are determined according to Pharmacology Testing Facility performance standards (SOP's) which are in accordance with the 1996 Guide for the Care and Use of Laboratory Animals (NRC). Animals are acclimated to the facility for at least 7 days prior to experimentation. During this time, animals are observed for overall health and sentinels are bled for baseline serology.

Experimental Groups

[0554] Each solution (VEGF and siNAs) was prepared as a 1× solution for final concentrations shown in the experimental groups described in Table III.

siNA Annealing Conditions

[0555] siNA sense and antisense strands are annealed for 1 minute in H₂O at 1.67 mg/mL/strand followed by a 1 hour incubation at 37° C. producing 3.34 mg/mL of duplexed siNA. For the 20 μg/eye treatment, 6 μLs of the 3.34 mg/mL duplex is injected into the eye (see below). The 3.34 mg/mL duplex siNA can then be serially diluted for dose response assays.

Preparation of VEGF Filter Disk

[0556] For corneal implantation, 0.57 mm diameter nitrocellulose disks, prepared from 0.45 μm pore diameter nitrocellulose filter membranes (Millipore Corporation), were soaked for 30 min in 1 μL of 75 μM VEGF in 82 mM Tris HCl (pH 6.9) in covered petri dishes on ice. Filter disks soaked only with the vehicle for VEGF (83 mM Tris-Cl pH 6.9) elicit no angiogenic response.

Corneal Surgery

[0557] The rat corneal model used in this study was a modified from Koch et al. Supra and Pandey et al., supra. Briefly, corneas were irrigated with 0.5% povidone iodine solution followed by normal saline and two drops of 2% lidocaine. Under a dissecting microscope (Leica MZ-6), a stromal pocket was created and a presoaked filter disk (see above) was inserted into the pocket such that its edge was 1 mm from the corneal limbus.

Intraconjunctival Injection of Test Solutions

[0558] Immediately after disk insertion, the tip of a 40-50 μm OD injector (constructed in our laboratory) was inserted within the conjunctival tissue 1 mm away from the edge of the corneal limbus that was directly adjacent to the VEGF-soaked filter disk. Six hundred nanoliters of test solution (siNA, inverted control or sterile water vehicle) were dispensed at a rate of 1.2 μL/min using a syringe pump (Kd Scientific). The injector was then removed, serially rinsed in 70% ethanol and sterile water and immersed in sterile water between each injection. Once the test solution was injected, closure of the eyelid was maintained using microaneurism clips until the animal began to recover gross motor activity. Following treatment, animals were warmed on a heating pad at 37° C.

Quantitation of Angiogenic Response

[0559] Five days after disk implantation, animals were euthanized following administration of 0.4 mg/kg atropine and corneas were digitally imaged. The neovascular surface area (NSA, expressed in pixels) was measured postmortem from blood-filled corneal vessels using computerized morphometry (Image Pro Plus, Media Cybernetics, v2.0). The individual mean NSA was determined in triplicate from three regions of identical size in the area of maximal neovascularization between the filter disk and the limbus. The number of pixels corresponding to the blood-filled corneal vessels in these regions was summated to produce an index of NSA. A group mean NSA was then calculated. Data from each treatment group were normalized to VEGF/siNA vehicle-treated control NSA and finally expressed as percent inhibition of VEGF-induced angiogenesis.

Statistics

[0560] After determining the normality of treatment group means, group mean percent inhibition of VEGF-induced angiogenesis was subjected to a one-way analysis of variance. This was followed by two post-hoc tests for significance including Dunnett's (comparison to VEGF control) and Tukey-Kramer (all other group mean comparisons) at alpha=0.05. Statistical analyses were performed using JMP v.3.1.6 (SAS Institute).

[0561] Results of the study are graphically represented in FIGS. 28 and 29. As shown in FIG. 28, VEGFR1 site 4229 active siNA (Sirna/RPI 29695/29699) at three concentrations was effective at inhibiting angiogenesis compared to the inverted siNA control (Sirna/RPI 29983/29984) and the VEGF control. A chemically modified version of the VEGFR1 site 4229 active siNA comprising a sense strand having 2′-deoxy-2′-fluoro pyrimidines and ribo purines with 5′ and 3′ terminal inverted deoxyabasic residues and an antisense strand having having 2′-deoxy-2′-fluoro pyrimidines and ribo purines with a terminal 3′-phosphorothioate internucleotide linkage (Sima/RPI 30196/30416), showed similar inhibition. Furthermore, VEGFR1 site 349 active siNA having “Stab 9/10” chemistry (Compound No. 31270/31273) was tested for inhibition of VEGF-induced angiogenesis at three different concentrations (2.0 ug, 1.0 ug, and 0.1 ug dose response) as compared to a matched chemistry inverted control siNA construct (Compound No. 31276/31279) at each concentration and a VEGF control in which no siNA was administered. As shown in FIG. 29, the active siNA construct having “Stab 9/10” chemistry (Compound No. 31270/31273) is highly effective in inhibiting VEGF-induced angiogenesis in the rat corneal model compared to the matched chemistry inverted control siNA at concentrations from 0.1 ug to 2.0 ug. These results demonstrate that siNA molecules having different chemically modified compositions, such as the modifications described herein, are capable of significantly inhibiting angiogenesis in vivo. Results of a follow study in which sites adjacent to VEGFR1 site 349 were evaluated for efficacy using two different siNA stabilization chemistries is shown in FIG. 30.

Evaluation of siNA Molecules Targeting Homologous VEGFR1 and VEGFR2 Sequences in the Rat Cornea Model of VEGF Induced Angiogenesis

[0562] The above model was utilized to evaluate the efficacy of siNA molecules targeting homologous VEGFR1 and VEGFR2 sequences in inibiting VEGF induced ocular angiogenesis. Test compounds and controls are referred to in Table VII, sequences are shown in Table II. The siNAs or other test articles were administered by subconjunctival injection after VEGF disk implantation. The siNAs were preannealed prior to administration. Subconjuctival injections were performed using polyimide coated fused silica glass catheter tubing (OD=148 μm, ID=74 μm). This tubing was inserted into a borosilicate glass micropipette that was pulled to a fine point of approximately 40-50 microns OD using a Flaming/Brown Micropipette Puller (Model P-87, Sutter Instrument Co.). The micropipette was inserted into the pericorneal conjunctiva in the vicinity of the implanted filter disc and a volume of 1.2 μL was delivered over 15 seconds using a Hamilton Gastight syringe (25 μL) and a syringe pump. The rat eye was prepared by trimming the whiskers around the eye and washing the eye with providone iodine following topical lidocaine anesthesia. The silver nitrate sticks were touched to the surface of the cornea to induce a wound healing response and concurrent neovascularization. On day five, animals were anesthetized using ketamine/xylazine/acepromazine and vessel growth scores obtained. Animals were euthanized by CO₂ inhalation and digital images of each eye were obtained for quantitation of vessel growth using Image Pro Plus. Quantitated neovascular surface area was analyzed by ANOVA followed by two post-hoc tests including Dunnet's and Tukey-Kramer tests for significance at the 95% confidence level. Results are shown in FIG. 31 as percent inhibition of VEGF induced angiogenesis compared to VEGF control. As shown in the figure, several siNA constructs that target both VEGFR1 and VEGFR2 via homologous sequences (e.g., compound Nos. 33725/33731, 33737/33743, 33742/33748, and 33729/33735) provide inhibition of VEGF-induced angiogenesis in this model. These compounds appear to provide equal or greater inhibition than a siNA construct (Compound No. 31270/31273) targeting VEGFR1 only.

Evaluation of siNA Molecules in the Mouse Coroidal Model of Neovascularization.

Intraocular Administration of siNA

[0563] Female C57BL/6 mice (4-5 weeks old) were anesthetized with a 0.2 ml of a mixture of ketamine/xylazine (8:1), and the pupils were dilated with a single drop of 1% tropicamide. Then a 532 nm diode laser photocoagulation (75 μm spot size, 0.1-second duration, 120 mW) was used to generate three laser spots in each eye surrounding the optic nerve by using a hand-held coverslip as a contact lens. A bubble formed at the laser spot indicating a rupture of the Bruch's membrane. Next, the laser spots were evaluated for the presence of CNV on day 17 after laser treatment.

[0564] After laser induction of multiple CNV lesions in mice, the siNA was administered by intraocular injections under a dissecting microscope. Intravitreous injections were performed with a Harvard pump microinjection apparatus and pulled glass micropipets. Each micropipet was calibrated to deliver 1 μL of vehicle containing 0.5 ug or 1.5 ug of siNA, inverted control siNA, or saline. The mice were anesthetized, pupils were dilated, and, the sharpened tip of the micropipet was passed through the sclera, just behind the limbus into the vitreous cavity, and the foot switch was depressed. The injection was repeated at day 7 after laser photocoagulation.

[0565] At the time of death, mice were anesthetized (ketamine/xylazine mixture, 8:1) and perfused through the heart with 1 ml PBS containing 50 mg/ml fluorescein-labeled dextran (FITC-Dextran, 2 million average molecular weight, Sigma). The eyes were removed and fixed for overnight in 1% phosphate-buffered 4% Formalin. The cornea and the lens were removed and the neurosensory retina was carefully dissected from the eyecup. Five radial cuts were made from the edge of the eyecup to the equator; the sclera-choroid-retinal pigment epithelium (RPE) complex was flat-mounted, with the sclera facing down, on a glass slide in Aquamount. Flat mounts were examined with a Nikon fluorescence microscope. A laser spot with green vessels was scored CNV-positive, and a laser spot lacking green vessels was scored CNV-negative. Flatmounts were examined by fluorescence microscopy (Axioskop; Carl Zeiss, Thornwood, N.Y.), and images were digitized with a three-color charge-coupled device (CCD) video camera and a frame grabber. Image-analysis software (Image-Pro Plus; Media Cybernetics, Silver Spring, Md.) was used to measure the total area of hyperfluorescence associated with each burn, corresponding to the total fibrovascular scar. The areas within each eye were averaged to give one experimental value per eye for plotting the areas.

[0566] Measurement of VEGFR1 expression was also determined using RT-PCR and/or real-time PCR. Retinal RNA was isolated by a Rnaeasy kit, and reverse transcription was performed with approximately 0.5 μg total RNA, reverse transcriptase (SuperScript II), and 5.0 μM oligo-d(T) primer. PCR amplification was performed using primers specific for VEGFR-1 (5′-AAGATGCCAGCCGAAGGAGA-3′, SEQ ID NO: 4253) and (5′-GGCTCGGCACCTATAGACA-3′, SEQ ID NO: 4254). Titrations were determined to ensure that PCR reactions were performed in the linear range of amplification. Mouse S16 ribosomal protein primers (5′-CACTGCAAACGGGGAAATGG-3′, SEQ ID NO: 4255 and 5′-TGAGATGGACTGTCGGATGG-3′, SEQ ID NO: 4256) were used to provide an internal control for the amount of template in the PCR reactions.

[0567] VEGFR1 site 349 active siNA having “Stab 9/10” chemistry (Compound No. 31270/31273, Table III) was tested for inhibition of VEGF-induced neovascularization at two different concentrations (1.5 ug, and 0.5 ug dose response) as compared to a matched chemistry 1.5 ug inverted control siNA construct (Compound No. 31276/31279, Table III) and a saline control. As shown in FIG. 32, the active siNA construct having “Stab 9/10” chemistry is highly effective in inhibiting VEGFR1 induced neovascularization (57% inhibition) in the C57BL/6 mice intraocular delivery model compared to the matched chemistry inverted control siNA. The active siNA construct was also highly effective in inhibiting VEGFR1 induced neovascularization (66% inhibition) compared to the saline control. Additionally, RT-PCR analysis of VEGFR1 site 349 siNA having “Stab 9/10” chemistry (Compound No. 31270/31273, Table III) showed significant reduction in the level of VEGFR1 mRNA compared to the inverted siNA construct (Compound No. 31276/31279, Table III) and saline. Furthermore, ELISA analysis of VEGFR1 protein using the active siNA and inverted control siNA above showed significant reduction in the level of VEGFR1 protein expression using the active siNA compared to the inactive siNA construct. These results demonstrate that siNA molecules having different chemically modified compositions, such as the modifications described herein, are capable of significantly inhibiting neovascularization as shown in this model of intraocular administration.

Periocular Administration of siNA

[0568] Female C57BL/6 mice (4-5 weeks old) were anesthetized with a 0.2 ml of a mixture of ketamine/xylazine (8:1), and the pupils were dilated with a single drop of 1% tropicamide. Then a 532 nm diode laser photocoagulation (75 μm spot size, 0.1-s duration, 120 mW) was used to generate three laser spots in each eye surrounding the optic nerve by using a hand-held coverslip as a contact lens. A bubble formed at the laser spot indicating a rupture of the Bruch's membrane. Next, the laser spots were evaluated for the presence of CNV on day 17 after laser treatment.

[0569] After laser induction of multiple CNV lesions in mice, the siNA was administered via periocular injections under a dissecting microscope. Periocular injections were performed with a Harvard pump microinjection apparatus and pulled glass micropipets. Each micropipet was calibrated to deliver 5 μL of vehicle containing test siNA at concentrations of 0.5 ug or 1.5 ug of siNA. The mice were anesthetized, pupils were dilated, and, the sharpened tip of the micropipet was passed, and the foot switch was depressed. Periocular injections were given daily starting at day 1 through day 14 after laser photocoagulation. Alternately, periocular injections are given every 3 days after rupture of Bruch's membrane.

[0570] At the time of death, mice were anesthetized (ketamine/xylazine mixture, 8:1) and perfused through the heart with 1 mL PBS containing 50 mg/mL fluorescein-labeled dextran (FITC-Dextran, 2 million average molecular weight, Sigma). The eyes were removed and fixed overnight in 1% phosphate-buffered 4% Formalin. The cornea and the lens were removed and the neurosensory retina was carefully dissected from the eyecup. Five radial cuts were made from the edge of the eyecup to the equator; the sclera-choroid-retinal pigment epithelium (RPE) complex was flat-mounted, with the sclera facing down, on a glass slide in Aquamount. Flat mounts were examined with a Nikon fluorescence microscope. A laser spot with green vessels was scored CNV-positive, and a laser spot lacking green vessels was scored CNV-negative. Flatmounts were examined by fluorescence microscopy (Axioskop; Carl Zeiss, Thornwood, N.Y.) and images were digitized with a three-color charge-coupled device (CCD) video camera and a frame grabber. Image-analysis software (Image-Pro Plus; Media Cybernetics, Silver Spring, Md.) was used to measure the total area of hyperfluorescence associated with each burn, corresponding to the total fibrovascular scar. The areas within each eye were averaged to give one experimental value per eye.

[0571] VEGFR1 site 349 active siNA having “Stab 9/10” chemistry (Compound No. 31270/31273, Table III) was tested for inhibition of VEGF-induced neovascularization at two different concentrations (1.5 ug, and 0.5 ug dose response) as compared to a matched chemistry saline control and 0.5 ug inverted control siRNA construct (Compound No. 31276/31279, Table III). As shown in FIG. 33, the active siNA construct having “Stab 9/10” chemistry (Compound No. 31270/31273) is effective in inhibiting VEGFR1 induced neovascularization (20% inhibition) in the C57BL/6 mice periocular delivery model compared to the matched chemistry inverted control siNA. The active siNA construct was also highly effective in inhibiting VEGFR1 induced neovascularization (54% inhibition) compared to the saline control. In an additional assay shown in FIG. 34, VEGFR1 site 349 active siNA having “Stab 9/10” chemistry (Compound No. 31270/31273) at two concentrations was effective at inhibiting neovascularization in CNV lesions compared to the inverted siNA control and the saline control. As shown in FIG. 34, the active siNA construct having “Stab 9/10” chemistry (Compound No. 31270/31273) is effective in inhibiting VEGFR1 induced neovascularization (43% inhibition) in the C57BL/6 mice periocular delivery model compared to the matched chemistry inverted control siNA. The active siNA construct was also effective in inhibiting VEGFR1 induced neovascularization (45% inhibition) compared to the saline control with periocular injection treatment given every 3 days after rupture of Bruch's membrane (see FIG. 35). These results demonstrate that siNA molecules having different chemically modified compositions, such as the modifications described herein, are capable of significantly inhibiting neovascularization as shown in this model of periocular administration.

Evaluation of siNA Molecules in the Mouse Retinopathy of Prematurity Model

[0572] The following protocol was used to evaluate siNA molecules targeting VEGF receptor mRNA in an oxygen-induced ischemic retinopathy/retinopathy of prematurity model. Pups from female C57BL/6 mice were placed into a 75% oxygen (ROP) environment at P7 (seven days after birth). Mothers were changed quickly at P10. Mice were removed from 75% oxygen chamber at P12. Pups were injected on P12, three hours after being removed from the 75% oxygen environment. siNA was delivered via an intravitreal or periocular injection under a dissecting microscope. A Harvard pump microinjection apparatus and pulled glass micropipette were used for injection. Each micropipette was calibrated to deliver 1 μL of vehicle containing test siRNA. The mice were anesthetized, the pupils were dilated, and the sharpened tip of the micropipette was passed through the limbus and the foot of the microinjection apparatus was depressed. Mice were sacrificed by cervical dislocation for RNA and protein extraction on P15, three days after being removed from the high oxygen environment. The retinas were removed and placed in appropriate lysis buffer (see below for protein and RNA analysis methods).

[0573] Protein Analysis: Protein lysis buffer contained 50 μL 1M Tris-HCl (pH 7.4), 50 μL 10% SDS (Sodium Dodecyl Sulfate), 5 μL 100 μM PHSF (Phenylmethaneculfonyl) and 5 mL serilized, de-ionized water. 200 μL of lysis buffer was added to fresh tissue, and homogenized by pipeting. Tissue was sonicated at 4° C. for 25 minutes, and spun at 13K for 5 minutes at 4° C. The pellet was discarded, and supernate transferred to fresh tube. BioRad assay was used to measure protein concentration using BSA as a standard. Samples were stored at −80° C. ELISAs were carried out using VEGFR1 and R2 kits from R&D Systems (Quantikine® Immunoassay). The protocols provided in the manuals were followed exactly.

[0574] RNA analysis: RNA was extracted using Quiagen, RNeasy mini kit and following protocol for extraction from animal cells. RNA samples were treated with DNA-free™ by Ambion following company protocol. First Strand cDNA was then synthesized for real time PCR using Invitrogen, Superscript 1st Strand System for RT-PCR, and following protocol. Real-time PCR was then preformed in a Roche Lightcycler using Fast Start DNA Master SYBR Green I. Cyclophilin A was used as a control, and purified PCR products were used as standards.

[0575] Analysis of neovascularization: Mice were sacrificed on P17 by cervical dislocation. Eyes were removed and fresh frozen in OCT and stored at −80° C. Eyes were then sectioned and immunohistochemically stained for lectin. 10 μm frozen sections of eyes were histochemically stained with biotinylated Griffonia simplicifolia lectin B4 (GSA; Vector Laboratories, Burlingame, Calif.), which selectively binds to endothelial cells. Slides were dried and fixed with 4% PFA for 20 minutes, then incubated in methanol/H₂O₂ for 10 minutes at room temperature. After washing with 0.05 M Tris-buffered saline, pH 7.6 (TBS), the slides were blocked with 10% swine serum for 30 minutes. Slides were first stained with biotinylated GSA for 2 hours at room temperature, followed by a thorough wash with 0.05 M TBS. The slides were further stained with avidin coupled to alkaline phosphatase (Vector Laboratories) for 45 minutes at room temperature. Slides were incubated with a red stain (Histomark Red; Kirkegaard and Perry, Gaithersburg, Md.) to give a red reaction product. A computer and image-analysis software (Image-Pro Plus software; Media Cybernetics, Silver Spring, Md.) was used to quantify GSA-stained cells on the surface of the retina, and their area was measured. The mean of the 15 measurements from each eye was used as a single experimental value.

[0576] Results of a representative study are shown in FIGS. 36 and 37. As shown in FIG. 36, in mice with oxygen induced retinopathy (OIR), periocular injections of VEGFR1 siNA (31270/31273) (5 μl; 1.5 μg/μl) on P12, P14, and P16 significantly reduced VEGFR1 mRNA expression compared to injections with a matched chemistry inverted control siNA construct (31276/31279), (40% inhibition; n=9, p=0.0121). As shown in FIG. 37, in mice with oxygen induced retinopathy (OIR), intraocular injections of VEGFR1 siNA (31270/31273) (5 μg), significantly reduced VEGFR1 protein levels compared to injections with a matched chemistry inverted control siNA construct (31276/31279), (30% inhibition; n=7, p=0.0103).

Evaluation of siNA Molecules in the Mouse 4T1-Luciferase Mammary Carcinoma Syngeneic Tumor Model

[0577] The current study was designed to determine if systemically administered siRNA directed against VEGFR-1 inhibits the growth of subcutaneous tumors. Test compounds included active Stab 9/10 siNA targeting site 349 of VEGFR-1 RNA (Compound # 31270/31273), a matched chemistry inactive inverted control siNA (Compound # 31276/31279) and saline. Animal subjects were female Balb/c mice approximately 20-25 g (5-7 weeks old). The number of subjects tested was 40 mice; treatment groups are described in Table VI. Mice were housed in groups of four. The feed, water, temperature and humidity conditions followed Pharmacology Testing Facility performance standards (SOP's) which are in accordance with the 1996 Guide for the Care and Use of Laboratory Animals (NRC). Animals were acclimated to the facility for at least 3 days prior to experimentation. During this time, animals were observed for overall health and sentinels were bled for baseline serology. 4T1-luc mammary carcinoma tumor cells were maintained in cell culture until injection into animals used in the study. On day 0 of the study, animals were anesthetized with ketamine/xylazine and 1.0×10⁶ cells in an injection volume of 100 μl were subcutaneously inoculated in the right flank. Primary tumor volume was measured using microcalipers. Length and width measurements were obtained from each tumor 3×/week (M,W,F) beginning 3 days after inoculation up through and including 21 days after inoculation. Tumor volumes were calculated from the length/width measurements according to the equation: Tumor volume=(a)(b)²/2 where a=the long axis of the tumor and b=the shorter axis of the tumor. Tumors were allowed to grow for a period of 3 days prior to dosing. Dosing consisted of a daily intravenous tail vein injection of the test compounds for 18 days. On day 21, animals were euthanized 24 hours following the last dose of test compound, or when the animals began to exhibit signs of moribundity (such as weight loss, lethargia, lack of grooming etc.) using CO₂ inhalation and lungs were subsequently removed. Lung metastases were counted under a Leitz dissecting microscope at 25× magnification. Tumors were removed and flash frozen in LN₂ for analysis of immunohistochemical endpoints or mRNA levels. Results are shown in FIG. 38. As shown in the Figure, the active siNA construct inhibited tumor growth by 50% compared to the inactive control siNA construct.

[0578] In addition, levels of soluble VEGFR1 in plasma were assessed in mice treated with the active and inverted control siNA constucts. FIG. 39 shows the reduction of soluble VEGFR1 serum levels in the mouse 4T1-luciferase mammary carcinoma syngeneic tumor model using active Stab 9/10 siNA targeting site 349 of VEGFR1 RNA (Compound # 31270/31273) compared to a matched chemistry inactive inverted control siNA (Compound # 31276/31279). As shown in FIG. 39, the active siNA construct is effective in reducing soluble VEGFR1 serum levels in this model.

### Example 11

### Multifunctional siNA Inhibition of VEGF and/or VEGFR RNA Expression

Multifunctional siNA Design

[0579] Once target sites have been identified for multifunctional siNA constructs, each strand of the siNA is designed with a complementary region of length, for example, of about 18 to about 28 nucleotides, that is complementary to a different target nucleic acid sequence. Each complementary region is designed with an adjacent flanking region of about 4 to about 22 nucleotides that is not complementary to the target sequence, but which comprises complementarity to the complementary region of the other sequence (see for example FIG. 16). Hairpin constructs can likewise be designed (see for example FIG. 17). Identification of complementary, palindrome or repeat sequences that are shared between the different target nucleic acid sequences can be used to shorten the overall length of the multifunctional siNA constructs (see for example FIGS. 18 and 19).

[0580] In a non-limiting example, a multifunctional siNA is designed to target two separate nucleic acid sequences. The goal is to combine two different siNAs together in one siNA that is active against two different targets. The siNAs are joined in a way that the 5′ of each strand starts with the “antisense” sequence of one of two siRNAs as shown in italics below.

SEQ ID NO:4257

3′ TTAGAAACCAGACGUAAGUGU GGUACGACCUGACGACCGU 5′

SEQ ID NO:4258

5′ UCUUUGGUCUGCAUUCACAC CAUGCUGGACUGCUGGCATT 3′

[0581] RISC is expected to incorporate either of the two strands from the 5′ end. This would lead to two types of active RISC populations carrying either strand. The 5′ 19 nt of each strand will act as guide sequence for degradation of separate target sequences.

[0582] In another example, the size of multifunctional siNA molecules is reduced by either finding overlaps or truncating the individual siNA length. The exemplary excercise described below indicates that for any given first target sequence, a shared complementary sequence in a second target sequence is likely to be found.

[0583] The number of spontaneous matches of short polynucleotide sequences (e.g., less than 14 nucleotides) that are expected to occur between two longer sequences generated independent of one another was investigated. A simulation using the uniform random generator SAS V8.1 utilized a 4,000 character string that was generated as a random repeating occurrence of the letters {ACGU}. This sequence was then broken into the nearly 4000 overlapping sets formed by taking S1 as the characters from positions (1,2 . . . n), S2 from positions (2,3 . . . , n+1) completely through the sequence to the last set, S 4000-n+1 from position (4000-n+1, . . . ,4000). This process was then repeated for a second 4000 character string. Occurrence of same sets (of size n) were then checked for sequence identity between the two strings by a sorting and match-merging routine. This procedure was repeated for sets of 9-11 characters. Results were an average of 55 matching sequences of length n=9 characters (range 39 to 72); 13 common sets (range 6 to 18) for size n=10, and 4 matches on average (range 0 to 6) for sets of 11 characters. The choice of 4000 for the original string length is approximately the length of the coding region of both VEGFR1 and VEGFR2. This simple simulation suggests that any two long coding regions formed independent of one-another will share common short sequences that can be used to shorten the length of multifunctional siNA constructs. In this example, common sequences of size 9 occurred by chance alone in >1% frequency.

[0584] Below is an example of a multifunctional siNA construct that targets VEGFR1 and VEGFR2 in which each strand has a total length of 24 nt with a 14 nt self complementary region (underline). The antisense region of each siNA ‘1’ targeting VEGFR1 and siNA ‘2’ targeting VEGFR2 (complementary regions are shown in italic) are used

| | |
|---|---|
| siNA ‘1’ | |
| 5′ CAAUUAGAGUGGCAGUGAG | (SEQ ID NO:4259) |
| 3′ GUUAAUCUCACCGUCACUC | (SEQ ID NO:4260) |
| siNA ‘2’ | |
| AGAGUGGCAGUGAGCAAAG 5′ | (SEQ ID NO:4261) |
| UCUCACCGUCACUCGUUUC 3′ | (SEQ ID NO:4262) |
| Multifunctiorial siNA | |
| CAAUUAGAGUGGCAGUGAGCAAAG | (SEQ ID NO:4263) |
| GUUAAUCUCACCGUCACUCGUUUC | (SEQ ID NO:4264) |

[0585] In another example, the length of a multifunctional siNA construct is reduced by determining whether fewer base pairs of sequence homology to each target sequence can be tolerated for effective RNAi activity. If so, the overall length of multifunctional siNA can be reduced as shown below. In the following hypothetical example, 4 nucleotides (bold) are reduced from each 19 nucleotide siNA ‘1’ and siNA ‘2’ constructs. The resulting multifunctional siNA is 30 base pairs long.

| | |
|---|---|
| siNA ‘1’ | |
| 5′ CAAUUAGAGUGGCAGUGAG | (SEQ ID NO:4259) |
| 3′ GUUAAUCUCACCGUCACUC | (SEQ ID NO:4260) |
| siNA ‘2’ | |
| AGAGUGGCAGUGAGCAAAG 5′ | (SEQ ID NO:4261) |
| UCUCACCGUCACUCGUUUC 3′ | (SEQ ID NO:4262) |
| Multifunctional siNA | |
| CAAUUAGAGUGGCAGUGGCAGUGAGCAAAG | (SEQ ID NO:4265) |
| GUUAAUCUCACCGUCACCGUCACUCGUUUC | (SEQ ID NO:4266) |

Multifunctional siNA Constructs Targeting VEGF and VEGFR RNA in a Dual-Reporter Plasmid System

[0586] The dual reporter assay used to evaluate multifunctional siNA constructs targeting VEGF and VEGFR RNA targets uses a dual-reporter plasmid, psiCHECK-II (Promega) that contains firefly and renilla luciferase genes. The sequence of interest (target RNA for siNAs) is cloned downstream of renilla luciferase stop codon. The loss of renilla luciferase activity is directly correlated to message degradation by the multifunctional siNA. The firefly luciferase activity is used as transfection control.

Cell Culture Analysis of Multifunctional siNA Activity

[0587] RNAi activities were evaluated in HeLa cells grown in 75 μl Iscove's solution containing 10% fetal calf serum to 70-80% confluency in 96-well plates at 37° C., 5% CO₂. Transfection mixtures consisting of 175.5 μl Opti-MEM I (Gibco-BRL), 2 μl Lipofectamine 2000 (Invitrogen) and 10 μl siCHECK™-2 plasmid containing appropriate target RNA sequence at 50 ng/μl (Promega) were prepared in microtiter plates. A 12.5 μl siRNA (1 μM) solution was added to the above mixture to bring the siRNA concentration to 62.5 nM. The transfection mixture was incubated for 20-30 min at 25° C. 50 μl of the transfection mixture was then added to 75 μl medium containing HeLa cells to bring the final siRNA concentration to 25 nM. Cell were incubated for 20 hours at 37° C., 5% CO₂.

Quantification of Gene Knockdown

[0588] Firefly and renilla luciferase luminescence was measured according to manufacturer's instructions for experiments carried out in a 96 well plate format. In a typical procedure, after 20 h transfection, 50 μl medium was removed from the culture and 75 μl Dual Go Luciferase reagent was added, and gently rocked for 10 minutes at room temperature. Firefly luminescence was measured on a 96 well plate reader. Subsequently 75 μl of freshly prepared Dual Glo Stop and Glow reagent was added, and plates were gently rocked for additional 10 minutes at room temperature. Renilla luminescence was measured on a 96 well plate reader. The ratio of firefly luminescence to renilla luminescence provided a normalized value of silencing activity. Results are shown in FIGS. 40-42. FIG. 40 shows RNA based multifunctional siNA mediated inhibition of (A) VEGF, (B) VEGFR1 and (C) VEGFR2 RNA. FIG. 41 shows stabilized multifunctional siNA mediated inhibition of (A) VEGF, (B) VEGFR1 and (C) VEGFR2 RNA. FIG. 42 shows non-nucleotide tethered multifunctional siNA mediated inhibition of VEGF, VEGFR1 and VEGFR2 RNA. These data demonstrate that the multifunctional siNA constructs are similarly effective in inhibition of VEGF and VEGFR RNA expression by targeting multiple sites as are individual siNA constructs that target each site.

Additional Multifuctional siNA Designs

[0589] Three categories of additional multifunctional siNA designs are presented that allow a single siNA molecule to silence multiple targets. The first method utilizes linkers to join siNAs (or multiunctional siNAs) in a direct manner. This can allow the most potent siNAs to be joined without creating a long, continuous stretch of RNA that has potential to trigger an interferon response. The second method is a dendrimeric extension of the overlapping or the linked multifunctional design; or alternatively the organization of siNA in a supramolecular format. The third method uses helix lengths greater than 30 base pairs. Processing of these siNAs by Dicer will reveal new, active 5′ antisense ends. Therefore, the long siNAs can target the sites defined by the original 5′ ends and those defined by the new ends that are created by Dicer processing. When used in combination with traditional multifunctional siNAs (where the sense and antisense strands each define a target) the approach can be used for example to target 4 or more sites.

1. Tethered Bifunctional siNAs

[0590] The basic idea is a novel approach to the design of multifunctional siNAs in which two antisense siNA strands are annealed to a single sense strand. The sense strand oligonucleotide contains a linker (e.g., non-nulcoetide linker as described herein) and two segments that anneal to the antisense siNA strands (see FIG. 43). The linkers can also optionally comprise nucleotide-based linkers. Several potential advantages and variations to this approach include, but are not limited to:
[0591] 1. The two antisense siNAs are independent. Therefore, the choice of target sites is not constrained by a requirement for sequence conservation between two sites. Any two highly active siNAs can be combined to form a multifunctional siNA.
[0592] 2. When used in combination with target sites having homology, siNAs that target a sequence present in two genes (e.g., different VEGF and/or VEGFR strains), the design can be used to target more than two sites. A single multifunctional siNA can be for example, used to target RNA of two different VEGF and/or VEGFR RNAs (using one antisense strand of the multifunctional siNA targeting of conserved sequence between to the two RNAs) and a host RNA (using the second antisense strand of the multifunctional siNA targeting host RNA (e.g., La antigen or FAS) This approach allows targeting of more than one VEGF and/or VEGFR strain and one or more host RNAs using a single multifunctional siNA.
[0593] 3. Multifunctional siNAs that use both the sense and antisense strands to target a gene can also be incorporated into a tethered multifuctional design. This leaves open the possibility of targeting 6 4 or more sites with a single complex.
[0594] 4. It can be possible to anneal more than two antisense strand siNAs to a single tethered sense strand.
[0595] 5. The design avoids long continuous stretches of dsRNA. Therefore, it is less likely to initiate an interferon response.
[0596] 6. The linker (or modifications attached to it, such as conjugates described herein) can improve the pharmacokinetic properties of the complex or improve its incorporation into liposomes. Modifications introduced to the linker should not impact siNA activity to the same extent that they would if directly attached to the siNA (see for example FIGS. 49 and 50).
[0597] 7. The sense strand can extend beyond the annealed antisense strands to provide additional sites for the attachment of conjugates.
[0598] 8. The polarity of the complex can be switched such that both of the antisense 3′ ends are adjacent to the linker and the 5′ ends are distal to the linker or combination thereof.
   Dendrimer and Supramolecular siNAs

[0599] In the dendrimer siNA approach, the synthesis of siNA is initiated by first synthesizing the dendrimer template followed by attaching various functional siNAs. Various constructs are depicted in FIG. 44. The number of functional siNAs that can be attached is only limited by the dimensions of the dendrimer used. Supramolecular approach to multifunctional siNA The supramolecular format simplifies the challenges of dendrimer synthesis. In this format, the siNA strands are synthesized by standard RNA chemistry, followed by annealing of various complementary strands. The individual strand synthesis contains an antisense sense sequence of one siNA at the 5′-end followed by a nucleic acid or synthetic linker, such as hexaethyleneglyol, which in turn is followed by sense strand of another siNA in 5′ to 3′ direction. Thus, the synthesis of siNA strands can be carried out in a standard 3′ to 5′ direction. Representative examples of trifunctional and tetrafunctional siNAs are depicted in FIG. 45. Based on a similar principle, higher functionality siNA constucts can be designed as long as efficient annealing of various strands is achieved.

Dicer Enabled Multifunctional siNA

[0600] Using bioinformatic analysis of multiple targets, stretches of identical sequences shared between differeing target sequences can be identified ranging from about two to about fourteen nucleotides in length. These identical regions can be designed into extended siNA helixes (e.g., >30 base pairs) such that the processing by Dicer reveals a secondary functional 5′-antisense site (see for example FIG. 46). For example, when the first 17 nucleotides of a siNA antisense strand (e.g., 21 nucleotide strands in a duplex with 3′-TT overhangs) are complementary to a target RNA, robust silencing was observed at 25 nM. 80% silencing was observed with only 16 nucleotide complementarity in the same format (see FIG. 48).

[0601] Incorporation of this property into the designs of siNAs of about 30 to 40 or more base pairs results in additional multifunctional siNA constructs. The example in FIG. 46 illustrates how a 30 base-pair duplex can target three distinct sequences after processing by Dicer-RNaseIII; these sequences can be on the same mRNA or separate RNAs, such as viral and host factor messages, or multiple points along a given pathway (e.g., inflammatory cascades). Furthermore, a 40 base-pair duplex can combine a bifunctional design in tandem, to provide a single duplex targeting four target sequences. An even more extensive approach can include use of homologous sequences (e.g. VEGFR-1/VEGFR-2) to enable five or six targets silenced for one multifunctional duplex. The example in FIG. 46 demonstrates how this can be achieved. A 30 base pair duplex is cleaved by Dicer into 22 and 8 base pair products from either end (8 b.p. fragments not shown). For ease of presentation the overhangs generated by dicer are not shown—but can be compensated for. Three targeting sequences are shown. The required sequence identity overlapped is indicated by grey boxes. The N's of the parent 30 b.p. siNA are suggested sites of 2′-OH positions to enable Dicer cleavage if this is tested in stabilized chemistries. Note that processing of a 30mer duplex by Dicer RNase III does not give a precise 22+8 cleavage, but rather produces a series of closely related products (with 22+8 being the primary site). Therefore, processing by Dicer will yield a series of active siNAs. Another non-limiting example is shown in FIG. 47. A 40 base pair duplex is cleaved by Dicer into 20 base pair products from either end. For ease of presentation the overhangs generated by dicer are not shown—but can be compensated for. Four targeting sequences are shown in four colors, blue, light-blue and red and orange. The required sequence identity overlapped is indicated by grey boxes. This design format can be extended to larger RNAs. If chemically stabilized siNAs are bound by Dicer, then strategically located ribonucleotide linkages can enable designer cleavage products that permit our more extensive repertoire of multiifunctional designs. For example cleavage products not limited to the Dicer standard of approximately 22-nucleotides can allow multifunctional siNA constructs with a target sequence identity overlap ranging from, for example, about 3 to about 15 nucleotides.

[0602] Another important aspect of this approach is its ability to restrict escape mutants. Processing to reveal an internal target site can ensure that escape mutations complementary to the eight nucleotides at the antisense 5′ end will not reduce siNA effectiveness. If about 17 nucleotidest of complementarity are required for RISC-mediated target cleavage, this will restrict, for example 8/17 or 47% of potential escape mutants.

### Example 12

### Indications

[0603] The present body of knowledge in VEGF and/or VEGFR research indicates the need for methods to assay VEGF and/or VEGFR activity and for compounds that can regulate VEGF and/or VEGFR expression for research, diagnostic, and therapeutic use. As described herein, the nucleic acid molecules of the present invention can be used in assays to diagnose disease state related of VEGF and/or VEGFR levels. In addition, the nucleic acid molecules can be used to treat disease state related to VEGF and/or VEGFR levels.

[0604] Particular conditions and disease states that can be associated with VEGF and/or VEGFR expression modulation include, but are not limited to:

[0605] 1) Tumor angiogenesis: Angiogenesis has been shown to be necessary for tumors to grow into pathological size (Folkman, 1971, PNAS 76, 5217-5221; Wellstein & Czubayko, 1996, Breast Cancer Res and Treatment 38, 109-119). In addition, it allows tumor cells to travel through the circulatory system during metastasis. Increased levels of gene expression of a number of angiogenic factors such as vascular endothelial growth factor (VEGF) have been reported in vascularized and edema-associated brain tumors (Berkman et al., 1993 J. Clini. Invest. 91, 153). A more direct demostration of the role of VEGF in tumor angiogenesis was demonstrated by Jim Kim et al., 1993 Nature 362,841 wherein, monoclonal antibodies against VEGF were successfully used to inhibit the growth of rhabdomyosarcoma, glioblastoma multiforme cells in nude mice. Similarly, expression of a dominant negative mutated form of the flt-1 VEGF receptor inhibits vascularization induced by human glioblastoma cells in nude mice (Millauer et al., 1994, Nature 367, 576). Specific tumor/cancer types that can be targeted using the nucleic acid molecules of the invention include but are not limited to the tumor/cancer types described herein.

[0606] 2) Ocular diseases: Neovascularization has been shown to cause or exacerbate ocular diseases including, but not limited to, macular degeneration, including age related macular degeneration (AMD), dry AMD, wet AMD, predominantly classic AMD (PD AMD), minimally classic AMD (MC AMD), and occult AMD; neovascular glaucoma, diabetic retinopathy, including diabetic macular edema (DME) and proliferative diabetic retinopathy; myopic degeneration, uveitis, and trachoma (Norrby, 1997, APMIS 105, 417-437). Aiello et al., 1994 New Engl. J. Med. 331, 1480, showed that the ocular fluid of a majority of patients suffering from diabetic retinopathy and other retinal disorders contains a high concentration of VEGF. Miller et al., 1994 Am. J. Pathol. 145, 574, reported elevated levels of VEGF mRNA in patients suffering from retinal ischemia. These observations support a direct role for VEGF in ocular diseases. Other factors, including those that stimulate VEGF synthesis, may also contribute to these indications.

[0607] 3) Dermatological Disorders: Many indications have been identified which may beangiogenesis dependent, including but not limited to, psoriasis, verruca vulgaris, angiofibroma of tuberous sclerosis, pot-wine stains, Sturge Weber syndrome, Kippel-Trenaunay-Weber syndrome, and Osler-Weber-Rendu syndrome (Norrby, supra). Intradermal injection of the angiogenic factor b-FGF demonstrated angiogenesis in nude mice (Weckbecker et al., 1992, Angiogenesis: Key principles-Science-Technology-Medicine, ed R. Steiner). Detmar et al., 1994 J. Exp. Med. 180, 1141 reported that VEGF and its receptors were over-expressed in psoriatic skin and psoriatic dermal microvessels, suggesting that VEGF plays a significant role in psoriasis.

[0608] 4) Rheumatoid arthritis: Immunohistochemistry and in situ hybridization studies on tissues from the joints of patients suffering from rheumatoid arthritis show an increased level of VEGF and its receptors (Fava et al., 1994 J. Exp. Med. 180, 341). Additionally, Koch et al., 1994 J. Immunol. 152, 4149, found that VEGF-specific antibodies were able to significantly reduce the mitogenic activity of synovial tissues from patients suffering from rheumatoid arthritis. These observations support a direct role for VEGF in rheumatoid arthritis. Other angiogenic factors including those of the present invention may also be involved in arthritis.

[0609] 5) Endometriosis: Various studies indicate that VEGF is directly implicated in endometriosis. In one study, VEGF concentrations measured by ELISA in peritoneal fluid were found to be significantly higher in women with endometriosis than in women without endometriosis (24.1±15 ng/ml vs 13.3±7.2 ng/ml in normals). In patients with endometriosis, higher concentrations of VEGF were detected in the proliferative phase of the menstrual cycle (33±13 ng/ml) compared to the secretory phase (10.7±5 ng/ml). The cyclic variation was not noted in fluid from normal patients (McLaren et al., 1996, Human Reprod. 11, 220-223). In another study, women with moderate to severe endometriosis had significantly higher concentrations of peritoneal fluid VEGF than women without endometriosis. There was a positive correlation between the severity of endometriosis and the concentration of VEGF in peritoneal fluid. In human endometrial biopsies, VEGF expression increased relative to the early proliferative phase approximately 1.6-, 2-, and 3.6-fold in midproliferative, late proliferative, and secretory endometrium (Shifren et al., 1996, J. Clin. Endocrinol. Metab. 81, 3112-3118). In a third study, VEGF-positive staining of human ectopic endometrium was shown to be localized to macrophages (double immunofluorescent staining with CD14 marker). Peritoneal fluid macrophages demonstrated VEGF staining in women with and without endometriosis. However, increased activation of macrophages (acid phosphatatse activity) was demonstrated in fluid from women with endometriosis compared with controls. Peritoneal fluid macrophage conditioned media from patients with endometriosis resulted in significantly increased cell proliferation ([³H] thymidine incorporation) in HUVEC cells compared to controls. The percentage of peritoneal fluid macrophages with VEGFR2 mRNA was higher during the secretory phase, and significantly higher in fluid from women with endometriosis (80±15%) compared with controls (32±20%). Flt-mRNA was detected in peritoneal fluid macrophages from women with and without endometriosis, but there was no difference between the groups or any evidence of cyclic dependence (McLaren et al., 1996, J. Clin. Invest. 98, 482-489). In the early proliferative phase of the menstrual cycle, VEGF has been found to be expressed in secretory columnar epithelium (estrogen-responsive) lining both the oviducts and the uterus in female mice. During the secretory phase, VEGF expression was shown to have shifted to the underlying stroma composing the functional endometrium. In addition to examining the endometium, neovascularization of ovarian follicles and the corpus luteum, as well as angiogenesis in embryonic implantation sites have been analyzed. For these processes, VEGF was expressed in spatial and temporal proximity to forming vasculature (Shweiki et al., 1993, J. Clin. Invest. 91, 2235-2243).

[0610] 6) Kidney disease: Autosomal dominant polycystic kidney disease (ADPKD) is the most common life threatening hereditary disease in the USA. It affects about 1:400 to 1:1000 people and approximately 50% of people with ADPKD develop renal failure. ADPKD accounts for about 5-10% of end-stage renal failure in the USA, requiring dialysis and renal transplantation. Angiogenesis is implicated in the progression of ADPKD for growth of cyst cells, as well as increased vascular permeability promoting fluid secretion into cysts. Proliferation of cystic epithelium is a feature of ADPKD because cyst cells in culture produce soluble vascular endothelial growth factor (VEGF). VEGFR1 has been detected in epithelial cells of cystic tubules but not in endothelial cells in the vasculature of cystic kidneys or normal kidneys. VEGFR2 expression is increased in endothelial cells of cyst vessels and in endothelial cells during renal ischemia-reperfusion.

[0611] 7) Respiratory/Inflammatory Disease: Exaggerated levels of VEGF are present in subjects with asthma, but the role of VEGF in normal and asthmatic lungs has not been well defined. Lee et al., 2004, Nature Medicine, 10, 1095-1103, generated lung-targeted VEGF165 transgenic mice and evaluated the role of VEGF in T-helper type 2 cell (TH2)-mediated inflammation in the lungs of these animals. In these mice, VEGF induced, through IL-3-dependent and independent pathways, an asthma-like phenotype characterized by inflammation, parenchymal and vascular remodeling, edema, mucus metaplasia, myocyte hyperplasia and airway hyper-responsiveness. VEGF was also found to enhance respiratory antigen sensitization and TH2 inflammation and increased the number of activated DC2 dendritic cells in the mice. In antigen-induced inflammation, VEGF was produced predominantly by epithelial cells and preferentially by TH2 as opposed to TH1 cells. In this setting, VEGF demonstrated a critical role in TH2 inflammation, cytokine production and physiologic dysregulation. Thus, VEGF is a mediator of vascular and extravascular remodeling, inflammation, and vascular permeability/edema that enhances antigen sensitization and is crucial in adaptive TH2 inflammation. Disruption of VEGF is therefore expected to be of therapeutic significance in the treatment of asthma and other TH2 disorders including allergic rhinitis, COPD, and airway sensitization/inflammation.

[0612] The use of radiation treatments and chemotherapeutics, such as Gemcytabine and cyclophosphamide, are non-limiting examples of chemotherapeutic agents that can be combined with or used in conjunction with the nucleic acid molecules (e.g. siNA molecules) of the instant invention. Those skilled in the art will recognize that other anti-cancer compounds and therapies can similarly be readily combined with the nucleic acid molecules of the instant invention (e.g. siNA molecules) and are hence within the scope of the instant invention. Such compounds and therapies are well known in the art (see for example Cancer: Principles and Pranctice of Oncology, Volumes 1 and 2, eds Devita, V. T., Hellman, S., and Rosenberg, S. A., J. B. Lippincott Company, Philadelphia, USA; incorporated herein by reference) and include, without limitation, folates, antifolates, pyrimidine analogs, fluoropyrimidines, purine analogs, adenosine analogs, topoisomerase I inhibitors, anthrapyrazoles, retinoids, antibiotics, anthacyclins, platinum analogs, alkylating agents, nitrosoureas, plant derived compounds such as vinca alkaloids, epipodophyllotoxins, tyrosine kinase inhibitors, taxols, radiation therapy, surgery, nutritional supplements; gene therapy, radiotherapy, for example 3D-CRT, immunotoxin therapy, for example ricin, and monoclonal antibodies. Specific examples of chemotherapeutic compounds that can be combined with or used in conjuction with the nucleic acid molecules of the invention include, but are not limited to, Paclitaxel; Docetaxel; Methotrexate; Doxorubin; Edatrexate; Vinorelbine; Tomaxifen; Leucovorin; 5-fluoro uridine (5-FU); Ionotecan; Cisplatin; Carboplatin; Amsacrine; Cytarabine; Bleomycin; Mitomycin C; Dactinomycin; Mithramycin; Hexamethylmelamine; Dacarbazine; L-asperginase; Nitrogen mustard; Melphalan, Chlorambucil; Busulfan; Ifosfamide; 4-hydroperoxycyclophosphamide; Thiotepa; Irinotecan (CAMPTOSAR®, CPT-11, Camptothecin-11, Campto) Tamoxifen; Herceptin; IMC C225; ABX-EGF; and combinations thereof. Non-limiting examples of therapies and compounds that can be used in combination with siNA molecules of the invention for ocular based diseases and conditions include submacular surgery, focal laser retinal photocoagulation, limited macular translocation surgery, retina and retinal pigment epithelial transplantation, retinal microchip prosthesis, feeder vessel CNVM laser photocoagulation, interferon alpha treatment, intravitreal steroid therapy, transpupillary thermotherapy, membrane differential filtration therapy, aptamers targeting VEGF (e.g., Macugen™) and/or VEGF receptors, antibodies targeting VEGF (e.g., Lucentis™) and/or VEGF receptors, Visudyne™ (e.g. use in photodynamic therapy, PDT), anti-imflammatory compounds such as Celebrex™ or anecortave acetate (e.g., Retaane™), angiostatic steroids such as glucocorticoids, intravitreal implants such as Posurdex™, FGF2 modulators, antiangiogenic compounds such as squalamine, and/or VEGF traps and other cytokine traps (see for example Economides et al., 2003, Nature Medicine, 9, 47-52).

[0613] The use of anticholinergic agents, anti-inflammatories, bronchodilators, adenosine inhibitors, adenosine A1 receptor inhibitors, non-selective M3 receptor antagonists such as atropine, ipratropium brominde and selective M3 receptor antagonists such as darifenacin and revatropate are all non-limiting examples of agents that can be combined with or used in conjunction with the nucleic acid molecules (e.g. siNA molecules) of the instant invention in treating inflammatory, allergic, or respiratory diseases and conditions.

[0614] The above list of compounds are non-limiting examples of compounds and/or methods that can be combined with or used in conjunction with the nucleic acid molecules (e.g. siNA) of the instant invention. Those skilled in the art will recognize that other drug compounds and therapies can similarly be readily combined with the nucleic acid molecules of the instant invention (e.g., siNA molecules) are hence within the scope of the instant invention.

### Example 13

### Diagnostic Uses

[0615] The siNA molecules of the invention can be used in a variety of diagnostic applications, such as in the identification of molecular targets (e.g., RNA) in a variety of applications, for example, in clinical, industrial, environmental, agricultural and/or research settings. Such diagnostic use of siNA molecules involves utilizing reconstituted RNAi systems, for example, using cellular lysates or partially purified cellular lysates. siNA molecules of this invention can be used as diagnostic tools to examine genetic drift and mutations within diseased cells or to detect the presence of endogenous or exogenous, for example viral, RNA in a cell. The close relationship between siNA activity and the structure of the target RNA allows the detection of mutations in any region of the molecule, which alters the base-pairing and three-dimensional structure of the target RNA. By using multiple siNA molecules described in this invention, one can map nucleotide changes, which are important to RNA structure and function in vitro, as well as in cells and tissues. Cleavage of target RNAs with siNA molecules can be used to inhibit gene expression and define the role of specified gene products in the progression of disease or infection. In this manner, other genetic targets can be defined as important mediators of the disease. These experiments will lead to better treatment of the disease progression by affording the possibility of combination therapies (e.g., multiple siNA molecules targeted to different genes, siNA molecules coupled with known small molecule inhibitors, or intermittent treatment with combinations siNA molecules and/or other chemical or biological molecules). Other in vitro uses of siNA molecules of this invention are well known in the art, and include detection of the presence of mRNAs associated with a disease, infection, or related condition. Such RNA is detected by determining the presence of a cleavage product after treatment with a siNA using standard methodologies, for example, fluorescence resonance emission transfer (FRET).

[0616] In a specific example, siNA molecules that cleave only wild-type or mutant forms of the target RNA are used for the assay. The first siNA molecules (i.e., those that cleave only wild-type forms of target RNA) are used to identify wild-type RNA present in the sample and the second siNA molecules (i.e., those that cleave only mutant forms of target RNA) are used to identify mutant RNA in the sample. As reaction controls, synthetic substrates of both wild-type and mutant RNA are cleaved by both siNA molecules to demonstrate the relative siNA efficiencies in the reactions and the absence of cleavage of the “non-targeted” RNA species. The cleavage products from the synthetic substrates also serve to generate size markers for the analysis of wild-type and mutant RNAs in the sample population. Thus, each analysis requires two siNA molecules, two substrates and one unknown sample, which is combined into six reactions. The presence of cleavage products is determined using an RNase protection assay so that full-length and cleavage fragments of each RNA can be analyzed in one lane of a polyacrylamide gel. It is not absolutely required to quantify the results to gain insight into the expression of mutant RNAs and putative risk of the desired phenotypic changes in target cells. The expression of mRNA whose protein product is implicated in the development of the phenotype (i.e., disease related or infection related) is adequate to establish risk. If probes of comparable specific activity are used for both transcripts, then a qualitative comparison of RNA levels is adequate and decreases the cost of the initial diagnosis. Higher mutant form to wild-type ratios are correlated with higher risk whether RNA levels are compared qualitatively or quantitatively.

[0617] All patents and publications mentioned in the specification are indicative of the levels of skill of those skilled in the art to which the invention pertains. All references cited in this disclosure are incorporated by reference to the same extent as if each reference had been incorporated by reference in its entirety individually.

[0618] One skilled in the art would readily appreciate that the present invention is well adapted to carry out the objects and obtain the ends and advantages mentioned, as well as those inherent therein. The methods and compositions described herein as presently representative of preferred embodiments are exemplary and are not intended as limitations on the scope of the invention. Changes therein and other uses will occur to those skilled in the art, which are encompassed within the spirit of the invention, are defined by the scope of the claims.

[0619] It will be readily apparent to one skilled in the art that varying substitutions and modifications can be made to the invention disclosed herein without departing from the scope and spirit of the invention. Thus, such additional embodiments are within the scope of the present invention and the following claims. The present invention teaches one skilled in the art to test various combinations and/or substitutions of chemical modifications described herein toward generating nucleic acid constructs with improved activity for mediating RNAi activity. Such improved activity can comprise improved stability, improved bioavailability, and/or improved activation of cellular responses mediating RNAi. Therefore, the specific embodiments described herein are not limiting and one skilled in the art can readily appreciate that specific combinations of the modifications described herein can be tested without undue experimentation toward identifying siNA molecules with improved RNAi activity.

[0620] The invention illustratively described herein suitably can be practiced in the absence of any element or elements, limitation or limitations that are not specifically disclosed herein. Thus, for example, in each instance herein any of the terms “comprising”, “consisting essentially of”, and “consisting of” may be replaced with either of the other two terms. The terms and expressions which have been employed are used as terms of description and not of limitation, and there is no intention that in the use of such terms and expressions of excluding any equivalents of the features shown and described or portions thereof, but it is recognized that various modifications are possible within the scope of the invention claimed. Thus, it should be understood that although the present invention has been specifically disclosed by preferred embodiments, optional features, modification and variation of the concepts herein disclosed may be resorted to by those skilled in the art, and that such modifications and variations are considered to be within the scope of this invention as defined by the description and the appended claims.

[0621] In addition, where features or aspects of the invention are described in terms of Markush groups or other grouping of alternatives, those skilled in the art will recognize that the invention is also thereby described in terms of any individual member or subgroup of members of the Markush group or other group.

TABLE I
VEGF and/or VEGFR Accession Numbers
NM_005429

Homo sapiens vascular endothelial growth factor C
(VEGFC), mRNA
gi|19924300|ref|NM_005429.2|[19924300]
NM_003376
Homo sapiens vascular endothelial growth factor
(VEGF), mRNA
gi|19923239|ref|NM_003376.2|[19923239]
AF095785
Homo sapiens vascular endothelial growth factor (VEGF)
gene, promoter region and
partial cds
gi|4154290|gb|AF095785.1|[4154290]
NM_003377
Homo sapiens vascular endothelial growth factor B
(VEGFB), mRNA
gi|20070172|ref|NM_003377.2|[20070172]
AF486837
Homo sapiens vascular endothelial growth factor
isoform VEGF165 (VEGF) mRNA,
complete cds
gi|19909064|gb|AF486837.1|[19909064]
AF468110
Homo sapiens vascular endothelial growth factor B
isoform (VEGFB) gene, complete
cds, alternatively spliced
gi|18766397|gb|AF468110.1|[18766397]
AF437895
Homo sapiens vascular endothelial growth factor (VEGF)
gene, partial cds
gi|16660685|gb|AF437895.1|AF437895[16660685]
AY047581
Homo sapiens vascular endothelial growth factor (VEGF)
mRNA, complete cds
gi|15422108|gb|AY047581.1|[15422108]
AF063657
Homo sapiens vascular endothelial growth factor
receptor (FLT1) mRNA, complete
cds
gi|3132830|gb|AF063657.1|AF063657[3132830]
AF092127
Homo sapiens vascular endothelial growth factor (VEGF)
gene, partial sequence
gi|4139168|gb|AF092127.1|AF092127[4139168]
AF092126
Homo sapiens vascular endothelial growth factor (VEGF)
gene, 5′ UTR
gi|4139167|gb|AF092126.1|AF092126[4139167]
AF092125
Homo sapiens vascular endothelial growth factor (VEGF)
gene, partial cds
gi|4139165|gb|AF092125.1|AF092125[4139165]
E15157
Human VEGF mRNA
gi|5709840|dbj|E15157.1||pat|JP|1998052285|2[5709840]
E15156
Human VEGF mRNA
gi|5709839|dbj|E15156.1||pat|JP|1998052285|1[5709839]
E14233
Human mRNA for vascular endothelial growth factor
(VEGF), complete cds
gi|5708916|dbj|E14233.1||pat|JP|1997286795|1[5708916]
AF024710
Homo sapiens vascular endothelial growth factor (VEGF)
mRNA, 3′UTR
gi|2565322|gb|AF024710.1|AF024710[2565322]
AJ010438
Homo sapiens mRNA for vascular endothelial growth
factor, splicing variant
VEGF183
gi|3647280|emb|AJ010438.1|HSA010438[3647280]
AF098331
Homo sapiens vascular endothelial growth factor (VEGF)
gene, promoter, partial
sequence
gi|4235431|gb|AF098331.1|AF098331[4235431]
AF022375
Homo sapiens vascular endothelial growth factor mRNA,
complete cds
gi|3719220|gb|AF022375.1|AF022375[3719220]
AH006909
vascular endothelial growth factor {alternative
splicing} [human, Genomic, 414
nt 5 segments]
gi|1680143|gb|AH006909.1||bbm|191843[1680143]
U01134
Human soluble vascular endothelial cell growth factor
receptor (sflt) mRNA,
complete cds
gi|451321|gb|U01134.1|U01134[451321]
E14000
Human mRNA for FLT
gi|3252767|dbj|E14000.1||pat|JP|1997255700|1[3252767]
E13332
cDNA encoding vascular endodermal cell growth factor
VEGF
gi|3252137|dbj|E13332.1||pat|JP|1997173075|1[3252137]
E13256
Human mRNA for FLT, complete cds
gi|3252061|dbj|E13256.1||pat|JP|1997154588|1[3252061]
AF063658
Homo sapiens vascular endothelial growth factor
receptor 2 (KDR) mRNA, complete
cds
gi|3132832|gb|AF063658.1|AF063658[3132832]
AJ000185
Homo sapiens mRNA for vascular endothelial growth
factor-D
gi|2879833|emb|AJ000185.1|HSAJ185[2879833]
D89630
Homo sapiens mRNA for VEGF-D, complete cds
gi|2780339|dbj|D89630.1|[2780339]
AF035121
Homo sapiens KDR/flk-1 protein mRNA, complete cds
gi|2655411|gb|AF035121.1|AF035121[2655411]
AF020393
Homo sapiens vascular endothelial growth factor C
gene, partial cds and 5′
upstream region
gi|2582366|gb|AF020393.1|AF020393[2582366]
Y08736
H. sapiens vegf gene, 3′UTR
gi|1619596|emb|Y08736.1|HSVEGF3UT[1619596]
X62568
H. sapiens vegf gene for vascular endothelial growth
factor
gi|37658|emb|X62568.1|HSVEGF[37658]
X94216
H. sapiens mRNA for VEGF-C protein
gi|1177488|emb|X94216.1|HSVEGFC[1177488]
NM_002020
Homo sapiens fms-related tyrosine kinase 4 (FLT4),
mRNA
gi|4503752|ref|NM_002020.1|[4503752]
NM_002253
Homo sapiens kinase insert domain receptor (a type III
receptor tyrosine kinase)
(KDR), mRNA
gi|11321596|ref|NM_002253.1|[11321596]

[0622] TABLE II
VEGF and/or VEGFR siNA AND TARGET SEQUENCES

VEGFR1/FLT1 NM_002019.1

| | | |
|---|---|---|
| Seq | Seq | Seq |

| | | | | | | | | |
|---|---|---|---|---|---|---|---|---|
| Pos | Target Sequence | ID | UPos | Upper seq | ID | LPos | Lower seq | ID |

| | | | | | | | | |
|---|---|---|---|---|---|---|---|---|
| 1 | GCGGACACUCCUCUCGGCU | 1 | 1 | GCGGACACUCCUCUCGGCU | 1 | 19 | AGCCGAGAGGAGUGUCCGC | 428 |
| 19 | UCCUCCCCGGCAGCGGCGG | 2 | 19 | UCCUCCCCGGCAGCGGCGG | 2 | 37 | CCGCCGCUGCCGGGGAGGA | 429 |
| 37 | GCGGCUCGGAGCGGGCUCC | 3 | 37 | GCGGCUCGGAGCGGGCUCC | 3 | 55 | GGAGCCCGCUCCGAGCCGC | 430 |
| 55 | CGGGGCUCGGGUGCAGCGG | 4 | 55 | CGGGGCUCGGGUGCAGCGG | 4 | 73 | CCGCUGCACCCGAGCCCCG | 431 |
| 73 | GCCAGCGGGCCUGGCGGCG | 5 | 73 | GCCAGCGGGCCUGGCGGCG | 5 | 91 | CGCCGCCAGGCCCGCUGGC | 432 |
| 91 | GAGGAUUACCCGGGGAAGU | 6 | 91 | GAGGAUUACCCGGGGAAGU | 6 | 109 | ACUUCCCCGGGUAAUCCUC | 433 |
| 109 | UGGUUGUCUCCUGGCUGGA | 7 | 109 | UGGUUGUCUCCUGGCUGGA | 7 | 127 | UCCAGCCAGGAGACAACCA | 434 |
| 127 | AGCCGCGAGACGGGCGCUC | 8 | 127 | AGCCGCGAGACGGGCGCUC | 8 | 145 | GAGCGCCCGUCUCGCGGCU | 435 |
| 145 | CAGGGCGCGGGGCCGGCGG | 9 | 145 | CAGGGCGCGGGGCCGGCGG | 9 | 163 | CCGCCGGCCCCGCGCCCUG | 436 |
| 163 | GCGGCGAACGAGAGGACGG | 10 | 163 | GCGGCGAACGAGAGGACGG | 10 | 181 | CCGUCCUCUCGUUCGCCGC | 437 |
| 181 | GACUCUGGCGGCCGGGUCG | 11 | 181 | GACUCUGGCGGCCGGGUCG | 11 | 199 | CGACCCGGCCGCCAGAGUC | 438 |
| 199 | GUUGGCCGGGGGAGCGCGG | 12 | 199 | GUUGGCCGGGGGAGCGCGG | 12 | 217 | CCGCGCUCCCCCGGCCAAC | 439 |
| 217 | GGCACCGGGCGAGCAGGCC | 13 | 217 | GGCACCGGGCGAGCAGGCC | 13 | 235 | GGCCUGCUCGCCCGGUGCC | 440 |
| 235 | CGCGUCGCGCUCACCAUGG | 14 | 235 | CGCGUCGCGCUCACCAUGG | 14 | 253 | CCAUGGUGAGCGCGACGCG | 441 |
| 253 | GUCAGCUACUGGGACACCG | 15 | 253 | GUCAGCUACUGGGACACCG | 15 | 271 | CGGUGUCCCAGUAGCUGAC | 442 |
| 271 | GGGGUCCUGCUGUGCGCGC | 16 | 271 | GGGGUCCUGCUGUGCGCGC | 16 | 289 | GCGCGCACAGCAGGACCCC | 443 |
| 289 | CUGCUCAGCUGUCUGCUUC | 17 | 289 | CUGCUCAGCUGUCUGCUUC | 17 | 307 | GAAGCAGACAGCUGAGCAG | 444 |
| 307 | CUCACAGGAUCUAGUUCAG | 18 | 307 | CUCACAGGAUCUAGUUCAG | 18 | 325 | CUGAACUAGAUCCUGUGAG | 445 |
| 325 | GGUUCAAAAUUAAAAGAUC | 19 | 325 | GGUUCAAAAUUAAAAGAUC | 19 | 343 | GAUCUUUUAAUUUUGAACC | 446 |
| 343 | CCUGAACUGAGUUUAAAAG | 20 | 343 | CCUGAACUGAGUUUAAAAG | 20 | 361 | CUUUUAAACUCAGUUCAGG | 447 |
| 361 | GGCACCCAGCACAUCAUGC | 21 | 361 | GGCACCCAGCACAUCAUGC | 21 | 379 | GCAUGAUGUGCUGGGUGCC | 448 |
| 379 | CAAGCAGGCCAGACACUGC | 22 | 379 | CAAGCAGGCCAGACACUGC | 22 | 397 | GCAGUGUCUGGCCUGCUUG | 449 |
| 397 | CAUCUCCAAUGCAGGGGGG | 23 | 397 | CAUCUCCAAUGCAGGGGGG | 23 | 415 | CCCCCCUGCAUUGGAGAUG | 450 |
| 415 | GAAGCAGCCCAUAAAUGGU | 24 | 415 | GAAGCAGCCCAUAAAUGGU | 24 | 433 | ACCAUUUAUGGGCUGCUUC | 451 |
| 433 | UCUUUGCCUGAAAUGGUGA | 25 | 433 | UCUUUGCCUGAAAUGGUGA | 25 | 451 | UCACCAUUUCAGGCAAAGA | 452 |
| 451 | AGUAAGGAAAGCGAAAGGC | 26 | 451 | AGUAAGGAAAGCGAAAGGC | 26 | 469 | GCCUUUCGCUUUCCUUACU | 453 |
| 469 | CUGAGCAUAACUAAAUCUG | 27 | 469 | CUGAGCAUAACUAAAUCUG | 27 | 487 | CAGAUUUAGUUAUGCUCAG | 454 |
| 487 | GCCUGUGGAAGAAAUGGCA | 28 | 487 | GCCUGUGGAAGAAAUGGCA | 28 | 505 | UGCCAUUUCUUCCACAGGC | 455 |
| 505 | AAACAAUUCUGCAGUACUU | 29 | 505 | AAACAAUUCUGCAGUACUU | 29 | 523 | AAGUACUGCAGAAUUGUUU | 456 |
| 523 | UUAACCUUGAACACAGCUC | 30 | 523 | UUAACCUUGAACACAGCUC | 30 | 541 | GAGCUGUGUUCAAGGUUAA | 457 |
| 541 | CAAGCAAACCACACUGGCU | 31 | 541 | CAAGCAAACCACACUGGCU | 31 | 559 | AGCCAGUGUGGUUUGCUUG | 458 |
| 559 | UUCUACAGCUGCAAAUAUC | 32 | 559 | UUCUACAGCUGCAAAUAUC | 32 | 577 | GAUAUUUGCAGCUGUAGAA | 459 |
| 577 | CUAGCUGUACCUACUUCAA | 33 | 577 | CUAGCUGUACCUACUUCAA | 33 | 595 | UUGAAGUAGGUACAGCUAG | 460 |
| 595 | AAGAAGAAGGAAACAGAAU | 34 | 595 | AAGAAGAAGGAAACAGAAU | 34 | 613 | AUUCUGUUUCCUUCUUCUU | 461 |
| 613 | UCUGCAAUCUAUAUAUUUA | 35 | 613 | UCUGCAAUCUAUAUAUUUA | 35 | 631 | UAAAUAUAUAGAUUGCAGA | 462 |
| 631 | AUUAGUGAUACAGGUAGAC | 36 | 631 | AUUAGUGAUACAGGUAGAC | 36 | 649 | GUCUACCUGUAUCACUAAU | 463 |
| 649 | CCUUUCGUAGAGAUGUACA | 37 | 649 | CCUUUCGUAGAGAUGUACA | 37 | 667 | UGUACAUCUCUACGAAAGG | 464 |
| 667 | AGUGAAAUCCCCGAAAUUA | 38 | 667 | AGUGAAAUCCCCGAAAUUA | 38 | 685 | UAAUUUCGGGGAUUUCACU | 465 |
| 685 | AUACACAUGACUGAAGGAA | 39 | 685 | AUACACAUGACUGAAGGAA | 39 | 703 | UUCCUUCAGUCAUGUGUAU | 466 |
| 703 | AGGGAGCUCGUCAUUCCCU | 40 | 703 | AGGGAGCUCGUCAUUCCCU | 40 | 721 | AGGGAAUGACGAGCUCCCU | 467 |
| 721 | UGCCGGGUUACGUCACCUA | 41 | 721 | UGCCGGGUUACGUCACCUA | 41 | 739 | UAGGUGACGUAACCCGGCA | 468 |
| 739 | AACAUCACUGUUACUUUAA | 42 | 739 | AACAUCACUGUUACUUUAA | 42 | 757 | UUAAAGUAACAGUGAUGUU | 469 |
| 757 | AAAAAGUUUCCACUUGACA | 43 | 757 | AAAAAGUUUCCACUUGACA | 43 | 775 | UGUCAAGUGGAAACUUUUU | 470 |
| 775 | ACUUUGAUCCCUGAUGGAA | 44 | 775 | ACUUUGAUCCCUGAUGGAA | 44 | 793 | UUCCAUCAGGGAUCAAAGU | 471 |
| 793 | AAACGCAUAAUCUGGGACA | 45 | 793 | AAACGCAUAAUCUGGGACA | 45 | 811 | UGUCCCAGAUUAUGCGUUU | 472 |
| 811 | AGUAGAAAGGGCUUCAUCA | 46 | 811 | AGUAGAAAGGGCUUCAUCA | 46 | 829 | UGAUGAAGCCCUUUCUACU | 473 |
| 829 | AUAUCAAAUGCAACGUACA | 47 | 829 | AUAUCAAAUGCAACGUACA | 47 | 847 | UGUACGUUGCAUUUGAUAU | 474 |
| 847 | AAAGAAAUAGGGCUUCUGA | 48 | 847 | AAAGAAAUAGGGCUUCUGA | 48 | 865 | UCAGAAGCCCUAUUUCUUU | 475 |
| 865 | ACCUGUGAAGCAACAGUCA | 49 | 865 | ACCUGUGAAGCAACAGUCA | 49 | 883 | UGACUGUUGCUUCACAGGU | 476 |
| 883 | AAUGGGCAUUUGUAUAAGA | 50 | 883 | AAUGGGCAUUUGUAUAAGA | 50 | 901 | UCUUAUACAAAUGCCCAUU | 477 |
| 901 | ACAAACUAUCUCACACAUC | 51 | 901 | ACAAACUAUCUCACACAUC | 51 | 919 | GAUGUGUGAGAUAGUUUGU | 478 |
| 919 | CGACAAACCAAUACAAUCA | 52 | 919 | CGACAAACCAAUACAAUCA | 52 | 937 | UGAUUGUAUUGGUUUGUCG | 479 |
| 937 | AUAGAUGUCCAAAUAAGCA | 53 | 937 | AUAGAUGUCCAAAUAAGCA | 53 | 955 | UGCUUAUUUGGACAUCUAU | 480 |
| 955 | ACACCACGCCCAGUCAAAU | 54 | 955 | ACACCACGCCCAGUCAAAU | 54 | 973 | AUUUGACUGGGCGUGGUGU | 481 |
| 973 | UUACUUAGAGGCCAUACUC | 55 | 973 | UUACUUAGAGGCCAUACUC | 55 | 991 | GAGUAUGGCCUCUAAGUAA | 482 |
| 991 | CUUGUCCUCAAUUGUACUG | 56 | 991 | CUUGUCCUCAAUUGUACUG | 56 | 1009 | CAGUACAAUUGAGGACAAG | 483 |
| 1009 | GCUACCACUCCCUUGAACA | 57 | 1009 | GCUACCACUCCCUUGAACA | 57 | 1027 | UGUUCAAGGGAGUGGUAGC | 484 |
| 1027 | ACGAGAGUUCAAAUGACCU | 58 | 1027 | ACGAGAGUUCAAAUGACCU | 58 | 1045 | AGGUCAUUUGAACUCUCGU | 485 |
| 1045 | UGGAGUUACCCUGAUGAAA | 59 | 1045 | UGGAGUUACCCUGAUGAAA | 59 | 1063 | UUUCAUCAGGGUAACUCCA | 486 |
| 1063 | AAAAAUAAGAGAGCUUCCG | 60 | 1063 | AAAAAUAAGAGAGCUUCCG | 60 | 1081 | CGGAAGCUCUCUUAUUUUU | 487 |
| 1081 | GUAAGGCGACGAAUUGACC | 61 | 1081 | GUAAGGCGACGAAUUGACC | 61 | 1099 | GGUCAAUUCGUCGCCUUAC | 488 |
| 1099 | CAAAGCAAUUCCCAUGCCA | 62 | 1099 | CAAAGCAAUUCCCAUGCCA | 62 | 1117 | UGGCAUGGGAAUUGCUUUG | 489 |
| 1117 | AACAUAUUCUACAGUGUUC | 63 | 1117 | AACAUAUUCUACAGUGUUC | 63 | 1135 | GAACACUGUAGAAUAUGUU | 490 |
| 1135 | CUUACUAUUGACAAAAUGC | 64 | 1135 | CUUACUAUUGACAAAAUGC | 64 | 1153 | GCAUUUUGUCAAUAGUAAG | 491 |
| 1153 | CAGAACAAAGACAAAGGAC | 65 | 1153 | CAGAACAAAGACAAAGGAC | 65 | 1171 | GUCCUUUGUCUUUGUUCUG | 492 |
| 1171 | CUUUAUACUUGUCGUGUAA | 66 | 1171 | CUUUAUACUUGUCGUGUAA | 66 | 1189 | UUACACGACAAGUAUAAAG | 493 |
| 1189 | AGGAGUGGACCAUCAUUCA | 67 | 1189 | AGGAGUGGACCAUCAUUCA | 67 | 1207 | UGAAUGAUGGUCCACUCCU | 494 |
| 1207 | AAAUCUGUUAACACCUCAG | 68 | 1207 | AAAUCUGUUAACACCUCAG | 68 | 1225 | CUGAGGUGUUAACAGAUUU | 495 |
| 1225 | GUGCAUAUAUAUGAUAAAG | 69 | 1225 | GUGCAUAUAUAUGAUAAAG | 69 | 1243 | CUUUAUCAUAUAUAUGCAC | 496 |
| 1243 | GCAUUCAUCACUGUGAAAC | 70 | 1243 | GCAUUCAUCACUGUGAAAC | 70 | 1261 | GUUUCACAGUGAUGAAUGC | 497 |
| 1261 | CAUCGAAAACAGCAGGUGC | 71 | 1261 | CAUCGAAAACAGCAGGUGC | 71 | 1279 | GCACCUGCUGUUUUCGAUG | 498 |
| 1279 | CUUGAAACCGUAGCUGGCA | 72 | 1279 | CUUGAAACCGUAGCUGGCA | 72 | 1297 | UGCCAGCUACGGUUUCAAG | 499 |
| 1297 | AAGCGGUCUUACCGGCUCU | 73 | 1297 | AAGCGGUCUUACCGGCUCU | 73 | 1315 | AGAGCCGGUAAGACCGCUU | 500 |
| 1315 | UCUAUGAAAGUGAAGGCAU | 74 | 1315 | UCUAUGAAAGUGAAGGCAU | 74 | 1333 | AUGCCUUCACUUUCAUAGA | 501 |
| 1333 | UUUCCCUCGCCGGAAGUUG | 75 | 1333 | UUUCCCUCGCCGGAAGUUG | 75 | 1351 | CAACUUCCGGCGAGGGAAA | 502 |
| 1351 | GUAUGGUUAAAAGAUGGGU | 76 | 1351 | GUAUGGUUAAAAGAUGGGU | 76 | 1369 | ACCCAUCUUUUAACCAUAC | 503 |
| 1369 | UUACCUGCGACUGAGAAAU | 77 | 1369 | UUACCUGCGACUGAGAAAU | 77 | 1387 | AUUUCUCAGUCGCAGGUAA | 504 |
| 1387 | UCUGCUCGCUAUUUGACUC | 78 | 1387 | UCUGCUCGCUAUUUGACUC | 78 | 1405 | GAGUCAAAUAGCGAGCAGA | 505 |
| 1405 | CGUGGCUACUCGUUAAUUA | 79 | 1405 | CGUGGCUACUCGUUAAUUA | 79 | 1423 | UAAUUAACGAGUAGCCACG | 506 |
| 1423 | AUCAAGGACGUAACUGAAG | 80 | 1423 | AUCAAGGACGUAACUGAAG | 80 | 1441 | CUUCAGUUACGUCCUUGAU | 507 |
| 1441 | GAGGAUGCAGGGAAUUAUA | 81 | 1441 | GAGGAUGCAGGGAAUUAUA | 81 | 1459 | UAUAAUUCCCUGCAUCCUC | 508 |
| 1459 | ACAAUCUUGCUGAGCAUAA | 82 | 1459 | ACAAUCUUGCUGAGCAUAA | 82 | 1477 | UUAUGCUCAGCAAGAUUGU | 509 |
| 1477 | AAACAGUCAAAUGUGUUUA | 83 | 1477 | AAACAGUCAAAUGUGUUUA | 83 | 1495 | UAAACACAUUUGACUGUUU | 510 |
| 1495 | AAAAACCUCACUGCCACUC | 84 | 1495 | AAAAACCUCACUGCCACUC | 84 | 1513 | GAGUGGCAGUGAGGUUUUU | 511 |
| 1513 | CUAAUUGUCAAUGUGAAAC | 85 | 1513 | CUAAUUGUCAAUGUGAAAC | 85 | 1531 | GUUUCACAUUGACAAUUAG | 512 |
| 1531 | CCCCAGAUUUACGAAAAGG | 86 | 1531 | CCCCAGAUUUACGAAAAGG | 86 | 1549 | CCUUUUCGUAAAUCUGGGG | 513 |
| 1549 | GCCGUGUCAUCGUUUCCAG | 87 | 1549 | GCCGUGUCAUCGUUUCCAG | 87 | 1567 | CUGGAAACGAUGACACGGC | 514 |
| 1567 | GACCCGGCUCUCUACCCAC | 88 | 1567 | GACCCGGCUCUCUACCCAC | 88 | 1585 | GUGGGUAGAGAGCCGGGUC | 515 |
| 1585 | CUGGGCAGCAGACAAAUCC | 89 | 1585 | CUGGGCAGCAGACAAAUCC | 89 | 1603 | GGAUUUGUCUGCUGCCCAG | 516 |
| 1603 | CUGACUUGUACCGCAUAUG | 90 | 1603 | CUGACUUGUACCGCAUAUG | 90 | 1621 | CAUAUGCGGUACAAGUCAG | 517 |
| 1621 | GGUAUCCCUCAACCUACAA | 91 | 1621 | GGUAUCCCUCAACCUACAA | 91 | 1639 | UUGUAGGUUGAGGGAUACC | 518 |
| 1639 | AUCAAGUGGUUCUGGCACC | 92 | 1639 | AUCAAGUGGUUCUGGCACC | 92 | 1657 | GGUGCCAGAACCACUUGAU | 519 |
| 1657 | CCCUGUAACCAUAAUCAUU | 93 | 1657 | CCCUGUAACCAUAAUCAUU | 93 | 1675 | AAUGAUUAUGGUUACAGGG | 520 |
| 1675 | UCCGAAGCAAGGUGUGACU | 94 | 1675 | UCCGAAGCAAGGUGUGACU | 94 | 1693 | AGUCACACCUUGCUUCGGA | 521 |
| 1693 | UUUUGUUCCAAUAAUGAAG | 95 | 1693 | UUUUGUUCCAAUAAUGAAG | 95 | 1711 | CUUCAUUAUUGGAACAAAA | 522 |
| 1711 | GAGUCCUUUAUCCUGGAUG | 96 | 1711 | GAGUCCUUUAUCCUGGAUG | 96 | 1729 | CAUCCAGGAUAAAGGACUC | 523 |
| 1729 | GCUGACAGCAACAUGGGAA | 97 | 1729 | GCUGACAGCAACAUGGGAA | 97 | 1747 | UUCCCAUGUUGCUGUCAGC | 524 |
| 1747 | AACAGAAUUGAGAGCAUCA | 98 | 1747 | AACAGAAUUGAGAGCAUCA | 98 | 1765 | UGAUGCUCUCAAUUCUGUU | 525 |
| 1765 | ACUCAGCGCAUGGCAAUAA | 99 | 1765 | ACUCAGCGCAUGGCAAUAA | 99 | 1783 | UUAUUGCCAUGCGCUGAGU | 526 |
| 1783 | AUAGAAGGAAAGAAUAAGA | 100 | 1783 | AUAGAAGGAAAGAAUAAGA | 100 | 1801 | UCUUAUUCUUUCCUUCUAU | 527 |
| 1801 | AUGGCUAGCACCUUGGUUG | 101 | 1801 | AUGGCUAGCACCUUGGUUG | 101 | 1819 | CAACCAAGGUGCUAGCCAU | 528 |
| 1819 | GUGGCUGACUCUAGAAUUU | 102 | 1819 | GUGGCUGACUCUAGAAUUU | 102 | 1837 | AAAUUCUAGAGUCAGCCAC | 529 |
| 1837 | UCUGGAAUCUACAUUUGCA | 103 | 1837 | UCUGGAAUCUACAUUUGCA | 103 | 1855 | UGCAAAUGUAGAUUCCAGA | 530 |
| 1855 | AUAGCUUCCAAUAAAGUUG | 104 | 1855 | AUAGCUUCCAAUAAAGUUG | 104 | 1873 | CAACUUUAUUGGAAGCUAU | 531 |
| 1873 | GGGACUGUGGGAAGAAACA | 105 | 1873 | GGGACUGUGGGAAGAAACA | 105 | 1891 | UGUUUCUUCCCACAGUCCC | 532 |
| 1891 | AUAAGCUUUUAUAUCACAG | 106 | 1891 | AUAAGCUUUUAUAUCACAG | 106 | 1909 | CUGUGAUAUAAAAGCUUAU | 533 |
| 1909 | GAUGUGCCAAAUGGGUUUC | 107 | 1909 | GAUGUGCCAAAUGGGUUUC | 107 | 1927 | GAAACCCAUUUGGCACAUC | 534 |
| 1927 | CAUGUUAACUUGGAAAAAA | 108 | 1927 | CAUGUUAACUUGGAAAAAA | 108 | 1945 | UUUUUUCCAAGUUAACAUG | 535 |
| 1945 | AUGCCGACGGAAGGAGAGG | 109 | 1945 | AUGCCGACGGAAGGAGAGG | 109 | 1963 | CCUCUCCUUCCGUCGGCAU | 536 |
| 1963 | GACCUGAAACUGUCUUGCA | 110 | 1963 | GACCUGAAACUGUCUUGCA | 110 | 1981 | UGCAAGACAGUUUCAGGUC | 537 |
| 1981 | ACAGUUAACAAGUUCUUAU | 111 | 1981 | ACAGUUAACAAGUUCUUAU | 111 | 1999 | AUAAGAACUUGUUAACUGU | 538 |
| 1999 | UACAGAGACGUUACUUGGA | 112 | 1999 | UACAGAGACGUUACUUGGA | 112 | 2017 | UCCAAGUAACGUCUCUGUA | 539 |
| 2017 | AUUUUACUGCGGACAGUUA | 113 | 2017 | AUUUUACUGCGGACAGUUA | 113 | 2035 | UAACUGUCCGCAGUAAAAU | 540 |
| 2035 | AAUAACAGAACAAUGCACU | 114 | 2035 | AAUAACAGAACAAUGCACU | 114 | 2053 | AGUGCAUUGUUCUGUUAUU | 541 |
| 2053 | UACAGUAUUAGCAAGCAAA | 115 | 2053 | UACAGUAUUAGCAAGCAAA | 115 | 2071 | UUUGCUUGCUAAUACUGUA | 542 |
| 2071 | AAAAUGGCCAUCACUAAGG | 116 | 2071 | AAAAUGGCCAUCACUAAGG | 116 | 2089 | CCUUAGUGAUGGCCAUUUU | 543 |
| 2089 | GAGCACUCCAUCACUCUUA | 117 | 2089 | GAGCACUCCAUCACUCUUA | 117 | 2107 | UAAGAGUGAUGGAGUGCUC | 544 |
| 2107 | AAUCUUACCAUCAUGAAUG | 118 | 2107 | AAUCUUACCAUCAUGAAUG | 118 | 2125 | CAUUCAUGAUGGUAAGAUU | 545 |
| 2125 | GUUUCCCUGCAAGAUUCAG | 119 | 2125 | GUUUCCCUGCAAGAUUCAG | 119 | 2143 | CUGAAUCUUGCAGGGAAAC | 546 |
| 2143 | GGCACCUAUGCCUGCAGAG | 120 | 2143 | GGCACCUAUGCCUGCAGAG | 120 | 2161 | CUCUGCAGGCAUAGGUGCC | 547 |
| 2161 | GCCAGGAAUGUAUACACAG | 121 | 2161 | GCCAGGAAUGUAUACACAG | 121 | 2179 | CUGUGUAUACAUUCCUGGC | 548 |
| 2179 | GGGGAAGAAAUCCUCCAGA | 122 | 2179 | GGGGAAGAAAUCCUCCAGA | 122 | 2197 | UCUGGAGGAUUUCUUCCCC | 549 |
| 2197 | AAGAAAGAAAUUACAAUCA | 123 | 2197 | AAGAAAGAAAUUACAAUCA | 123 | 2215 | UGAUUGUAAUUUCUUUCUU | 550 |
| 2215 | AGAGAUCAGGAAGCACCAU | 124 | 2215 | AGAGAUCAGGAAGCACCAU | 124 | 2233 | AUGGUGCUUCCUGAUCUCU | 551 |
| 2233 | UACCUCCUGCGAAACCUCA | 125 | 2233 | UACCUCCUGCGAAACCUCA | 125 | 2251 | UGAGGUUUCGCAGGAGGUA | 552 |
| 2251 | AGUGAUCACACAGUGGCCA | 126 | 2251 | AGUGAUCACACAGUGGCCA | 126 | 2269 | UGGCCACUGUGUGAUCACU | 553 |
| 2269 | AUCAGCAGUUCCACCACUU | 127 | 2269 | AUCAGCAGUUCCACCACUU | 127 | 2287 | AAGUGGUGGAACUGCUGAU | 554 |
| 2287 | UUAGACUGUCAUGCUAAUG | 128 | 2287 | UUAGACUGUCAUGCUAAUG | 128 | 2305 | CAUUAGCAUGACAGUCUAA | 555 |
| 2305 | GGUGUCCCCGAGCCUCAGA | 129 | 2305 | GGUGUCCCCGAGCCUCAGA | 129 | 2323 | UCUGAGGCUCGGGGACACC | 556 |
| 2323 | AUCACUUGGUUUAAAAACA | 130 | 2323 | AUCACUUGGUUUAAAAACA | 130 | 2341 | UGUUUUUAAACCAAGUGAU | 557 |
| 2341 | AACCACAAAAUACAACAAG | 131 | 2341 | AACCACAAAAUACAACAAG | 131 | 2359 | CUUGUUGUAUUUUGUGGUU | 558 |
| 2359 | GAGCCUGGAAUUAUUUUAG | 132 | 2359 | GAGCCUGGAAUUAUUUUAG | 132 | 2377 | CUAAAAUAAUUCCAGGCUC | 559 |
| 2377 | GGACCAGGAAGCAGCACGC | 133 | 2377 | GGACCAGGAAGCAGCACGC | 133 | 2395 | GCGUGCUGCUUCCUGGUCC | 560 |
| 2395 | CUGUUUAUUGAAAGAGUCA | 134 | 2395 | CUGUUUAUUGAAAGAGUCA | 134 | 2413 | UGACUCUUUCAAUAAACAG | 561 |
| 2413 | ACAGAAGAGGAUGAAGGUG | 135 | 2413 | ACAGAAGAGGAUGAAGGUG | 135 | 2431 | CACCUUCAUCCUCUUCUGU | 562 |
| 2431 | GUCUAUCACUGCAAAGCCA | 136 | 2431 | GUCUAUCACUGCAAAGCCA | 136 | 2449 | UGGCUUUGCAGUGAUAGAC | 563 |
| 2449 | ACCAACCAGAAGGGCUCUG | 137 | 2449 | ACCAACCAGAAGGGCUCUG | 137 | 2467 | CAGAGCCCUUCUGGUUGGU | 564 |
| 2467 | GUGGAAAGUUCAGCAUACC | 138 | 2467 | GUGGAAAGUUCAGCAUACC | 138 | 2485 | GGUAUGCUGAACUUUCCAC | 565 |
| 2485 | CUCACUGUUCAAGGAACCU | 139 | 2485 | CUCACUGUUCAAGGAACCU | 139 | 2503 | AGGUUCCUUGAACAGUGAG | 566 |
| 2503 | UCGGACAAGUCUAAUCUGG | 140 | 2503 | UCGGACAAGUCUAAUCUGG | 140 | 2521 | CCAGAUUAGACUUGUCCGA | 567 |
| 2521 | GAGCUGAUCACUCUAACAU | 141 | 2521 | GAGCUGAUCACUCUAACAU | 141 | 2539 | AUGUUAGAGUGAUCAGCUC | 568 |
| 2539 | UGCACCUGUGUGGCUGCGA | 142 | 2539 | UGCACCUGUGUGGCUGCGA | 142 | 2557 | UCGCAGCCACACAGGUGCA | 569 |
| 2557 | ACUCUCUUCUGGCUCCUAU | 143 | 2557 | ACUCUCUUCUGGCUCCUAU | 143 | 2575 | AUAGGAGCCAGAAGAGAGU | 570 |
| 2575 | UUAACCCUCCUUAUCCGAA | 144 | 2575 | UUAACCCUCCUUAUCCGAA | 144 | 2593 | UUCGGAUAAGGAGGGUUAA | 571 |
| 2593 | AAAAUGAAAAGGUCUUCUU | 145 | 2593 | AAAAUGAAAAGGUCUUCUU | 145 | 2611 | AAGAAGACCUUUUCAUUUU | 572 |
| 2611 | UCUGAAAUAAAGACUGACU | 146 | 2611 | UCUGAAAUAAAGACUGACU | 146 | 2629 | AGUCAGUCUUUAUUUCAGA | 573 |
| 2629 | UACCUAUCAAUUAUAAUGG | 147 | 2629 | UACCUAUCAAUUAUAAUGG | 147 | 2647 | CCAUUAUAAUUGAUAGGUA | 574 |
| 2647 | GACCCAGAUGAAGUUCCUU | 148 | 2647 | GACCCAGAUGAAGUUCCUU | 148 | 2665 | AAGGAACUUCAUCUGGGUC | 575 |
| 2665 | UUGGAUGAGCAGUGUGAGC | 149 | 2665 | UUGGAUGAGCAGUGUGAGC | 149 | 2683 | GCUCACACUGCUCAUCCAA | 576 |
| 2683 | CGGCUCCCUUAUGAUGCCA | 150 | 2683 | CGGCUCCCUUAUGAUGCCA | 150 | 2701 | UGGCAUCAUAAGGGAGCCG | 577 |
| 2701 | AGCAAGUGGGAGUUUGCCC | 151 | 2701 | AGCAAGUGGGAGUUUGCCC | 151 | 2719 | GGGCAAACUCCCACUUGCU | 578 |
| 2719 | CGGGAGAGACUUAAACUGG | 152 | 2719 | CGGGAGAGACUUAAACUGG | 152 | 2737 | CCAGUUUAAGUCUCUCCCG | 579 |
| 2737 | GGCAAAUCACUUGGAAGAG | 153 | 2737 | GGCAAAUCACUUGGAAGAG | 153 | 2755 | CUCUUCCAAGUGAUUUGCC | 580 |
| 2755 | GGGGCUUUUGGAAAAGUGG | 154 | 2755 | GGGGCUUUUGGAAAAGUGG | 154 | 2773 | CCACUUUUCCAAAAGCCCC | 581 |
| 2773 | GUUCAAGCAUCAGCAUUUG | 155 | 2773 | GUUCAAGCAUCAGCAUUUG | 155 | 2791 | CAAAUGCUGAUGCUUGAAC | 582 |
| 2791 | GGCAUUAAGAAAUCACCUA | 156 | 2791 | GGCAUUAAGAAAUCACCUA | 156 | 2809 | UAGGUGAUUUCUUAAUGCC | 583 |
| 2809 | ACGUGCCGGACUGUGGCUG | 157 | 2809 | ACGUGCCGGACUGUGGCUG | 157 | 2827 | CAGCCACAGUCCGGCACGU | 584 |
| 2827 | GUGAAAAUGCUGAAAGAGG | 158 | 2827 | GUGAAAAUGCUGAAAGAGG | 158 | 2845 | CCUCUUUCAGCAUUUUCAC | 585 |
| 2845 | GGGGCCACGGCCAGCGAGU | 159 | 2845 | GGGGCCACGGCCAGCGAGU | 159 | 2863 | ACUCGCUGGCCGUGGCCCC | 586 |
| 2863 | UACAAAGCUCUGAUGACUG | 160 | 2863 | UACAAAGCUCUGAUGACUG | 160 | 2881 | CAGUCAUCAGAGCUUUGUA | 587 |
| 2881 | GAGCUAAAAAUCUUGACCC | 161 | 2881 | GAGCUAAAAAUCUUGACCC | 161 | 2899 | GGGUCAAGAUUUUUAGCUC | 588 |
| 2899 | CACAUUGGCCACCAUCUGA | 162 | 2899 | CACAUUGGCCACCAUCUGA | 162 | 2917 | UCAGAUGGUGGCCAAUGUG | 589 |
| 2917 | AACGUGGUUAACCUGCUGG | 163 | 2917 | AACGUGGUUAACCUGCUGG | 163 | 2935 | CCAGCAGGUUAACCACGUU | 590 |
| 2935 | GGAGCCUGCACCAAGCAAG | 164 | 2935 | GGAGCCUGCACCAAGCAAG | 164 | 2953 | CUUGCUUGGUGCAGGCUCC | 591 |
| 2953 | GGAGGGCCUCUGAUGGUGA | 165 | 2953 | GGAGGGCCUCUGAUGGUGA | 165 | 2971 | UCACCAUCAGAGGCCCUCC | 592 |
| 2971 | AUUGUUGAAUACUGCAAAU | 166 | 2971 | AUUGUUGAAUACUGCAAAU | 166 | 2989 | AUUUGCAGUAUUCAACAAU | 593 |
| 2989 | UAUGGAAAUCUCUCCAACU | 167 | 2989 | UAUGGAAAUCUCUCCAACU | 167 | 3007 | AGUUGGAGAGAUUUCCAUA | 594 |
| 3007 | UACCUCAAGAGCAAACGUG | 168 | 3007 | UACCUCAAGAGCAAACGUG | 168 | 3025 | CACGUUUGCUCUUGAGGUA | 595 |
| 3025 | GACUUAUUUUUUCUCAACA | 169 | 3025 | GACUUAUUUUUUCUCAACA | 169 | 3043 | UGUUGAGAAAAAAUAAGUC | 596 |
| 3043 | AAGGAUGCAGCACUACACA | 170 | 3043 | AAGGAUGCAGCACUACACA | 170 | 3061 | UGUGUAGUGCUGCAUCCUU | 597 |
| 3061 | AUGGAGCCUAAGAAAGAAA | 171 | 3061 | AUGGAGCCUAAGAAAGAAA | 171 | 3079 | UUUCUUUCUUAGGCUCCAU | 598 |
| 3079 | AAAAUGGAGCCAGGCCUGG | 172 | 3079 | AAAAUGGAGCCAGGCCUGG | 172 | 3097 | CCAGGCCUGGCUCCAUUUU | 599 |
| 3097 | GAACAAGGCAAGAAACCAA | 173 | 3097 | GAACAAGGCAAGAAACCAA | 173 | 3115 | UUGGUUUCUUGCCUUGUUC | 600 |
| 3115 | AGACUAGAUAGCGUCACCA | 174 | 3115 | AGACUAGAUAGCGUCACCA | 174 | 3133 | UGGUGACGCUAUCUAGUCU | 601 |
| 3133 | AGCAGCGAAAGCUUUGCGA | 175 | 3133 | AGCAGCGAAAGCUUUGCGA | 175 | 3151 | UCGCAAAGCUUUCGCUGCU | 602 |
| 3151 | AGCUCCGGCUUUCAGGAAG | 176 | 3151 | AGCUCCGGCUUUCAGGAAG | 176 | 3169 | CUUCCUGAAAGCCGGAGCU | 603 |
| 3169 | GAUAAAAGUCUGAGUGAUG | 177 | 3169 | GAUAAAAGUCUGAGUGAUG | 177 | 3187 | CAUCACUCAGACUUUUAUC | 604 |
| 3187 | GUUGAGGAAGAGGAGGAUU | 178 | 3187 | GUUGAGGAAGAGGAGGAUU | 178 | 3205 | AAUCCUCCUCUUCCUCAAC | 605 |
| 3205 | UCUGACGGUUUCUACAAGG | 179 | 3205 | UCUGACGGUUUCUACAAGG | 179 | 3223 | CCUUGUAGAAACCGUCAGA | 606 |
| 3223 | GAGCCCAUCACUAUGGAAG | 180 | 3223 | GAGCCCAUCACUAUGGAAG | 180 | 3241 | CUUCCAUAGUGAUGGGCUC | 607 |
| 3241 | GAUCUGAUUUCUUACAGUU | 181 | 3241 | GAUCUGAUUUCUUACAGUU | 181 | 3259 | AACUGUAAGAAAUCAGAUC | 608 |
| 3259 | UUUCAAGUGGCCAGAGGCA | 182 | 3259 | UUUCAAGUGGCCAGAGGCA | 182 | 3277 | UGCCUCUGGCCACUUGAAA | 609 |
| 3277 | AUGGAGUUCCUGUCUUCCA | 183 | 3277 | AUGGAGUUCCUGUCUUCCA | 183 | 3295 | UGGAAGACAGGAACUCCAU | 610 |
| 3295 | AGAAAGUGCAUUCAUCGGG | 184 | 3295 | AGAAAGUGCAUUCAUCGGG | 184 | 3313 | CCCGAUGAAUGCACUUUCU | 611 |
| 3313 | GACCUGGCAGCGAGAAACA | 185 | 3313 | GACCUGGCAGCGAGAAACA | 185 | 3331 | UGUUUCUCGCUGCCAGGUC | 612 |
| 3331 | AUUCUUUUAUCUGAGAACA | 186 | 3331 | AUUCUUUUAUCUGAGAACA | 186 | 3349 | UGUUCUCAGAUAAAAGAAU | 613 |
| 3349 | AACGUGGUGAAGAUUUGUG | 187 | 3349 | AACGUGGUGAAGAUUUGUG | 187 | 3367 | CACAAAUCUUCACCACGUU | 614 |
| 3367 | GAUUUUGGCCUUGCCCGGG | 188 | 3367 | GAUUUUGGCCUUGCCCGGG | 188 | 3385 | CCCGGGCAAGGCCAAAAUC | 615 |
| 3385 | GAUAUUUAUAAGAACCCCG | 189 | 3385 | GAUAUUUAUAAGAACCCCG | 189 | 3403 | CGGGGUUCUUAUAAAUAUC | 616 |
| 3403 | GAUUAUGUGAGAAAAGGAG | 190 | 3403 | GAUUAUGUGAGAAAAGGAG | 190 | 3421 | CUCCUUUUCUCACAUAAUC | 617 |
| 3421 | GAUACUCGACUUCCUCUGA | 191 | 3421 | GAUACUCGACUUCCUCUGA | 191 | 3439 | UCAGAGGAAGUCGAGUAUC | 618 |
| 3439 | AAAUGGAUGGCUCCCGAAU | 192 | 3439 | AAAUGGAUGGCUCCCGAAU | 192 | 3457 | AUUCGGGAGCCAUCCAUUU | 619 |
| 3457 | UCUAUCUUUGACAAAAUCU | 193 | 3457 | UCUAUCUUUGACAAAAUCU | 193 | 3475 | AGAUUUUGUCAAAGAUAGA | 620 |
| 3475 | UACAGCACCAAGAGCGACG | 194 | 3475 | UACAGCACCAAGAGCGACG | 194 | 3493 | CGUCGCUCUUGGUGCUGUA | 621 |
| 3493 | GUGUGGUCUUACGGAGUAU | 195 | 3493 | GUGUGGUCUUACGGAGUAU | 195 | 3511 | AUACUCCGUAAGACCACAC | 622 |
| 3511 | UUGCUGUGGGAAAUCUUCU | 196 | 3511 | UUGCUGUGGGAAAUCUUCU | 196 | 3529 | AGAAGAUUUCCCACAGCAA | 623 |
| 3529 | UCCUUAGGUGGGUCUCCAU | 197 | 3529 | UCCUUAGGUGGGUCUCCAU | 197 | 3547 | AUGGAGACCCACCUAAGGA | 624 |
| 3547 | UACCCAGGAGUACAAAUGG | 198 | 3547 | UACCCAGGAGUACAAAUGG | 198 | 3565 | CCAUUUGUACUCCUGGGUA | 625 |
| 3565 | GAUGAGGACUUUUGCAGUC | 199 | 3565 | GAUGAGGACUUUUGCAGUC | 199 | 3583 | GACUGCAAAAGUCCUCAUC | 626 |
| 3583 | CGCCUGAGGGAAGGCAUGA | 200 | 3583 | CGCCUGAGGGAAGGCAUGA | 200 | 3601 | UCAUGCCUUCCCUCAGGCG | 627 |
| 3601 | AGGAUGAGAGCUCCUGAGU | 201 | 3601 | AGGAUGAGAGCUCCUGAGU | 201 | 3619 | ACUCAGGAGCUCUCAUCCU | 628 |
| 3619 | UACUCUACUCCUGAAAUCU | 202 | 3619 | UACUCUACUCCUGAAAUCU | 202 | 3637 | AGAUUUCAGGAGUAGAGUA | 629 |
| 3637 | UAUCAGAUCAUGCUGGACU | 203 | 3637 | UAUCAGAUCAUGCUGGACU | 203 | 3655 | AGUCCAGCAUGAUCUGAUA | 630 |
| 3655 | UGCUGGCACAGAGACCCAA | 204 | 3655 | UGCUGGCACAGAGACCCAA | 204 | 3673 | UUGGGUCUCUGUGCCAGCA | 631 |
| 3673 | AAAGAAAGGCCAAGAUUUG | 205 | 3673 | AAAGAAAGGCCAAGAUUUG | 205 | 3691 | CAAAUCUUGGCCUUUCUUU | 632 |
| 3691 | GCAGAACUUGUGGAAAAAC | 206 | 3691 | GCAGAACUUGUGGAAAAAC | 206 | 3709 | GUUUUUCCACAAGUUCUGC | 633 |
| 3709 | CUAGGUGAUUUGCUUCAAG | 207 | 3709 | CUAGGUGAUUUGCUUCAAG | 207 | 3727 | CUUGAAGCAAAUCACCUAG | 634 |
| 3727 | GCAAAUGUACAACAGGAUG | 208 | 3727 | GCAAAUGUACAACAGGAUG | 208 | 3745 | CAUCCUGUUGUACAUUUGC | 635 |
| 3745 | GGUAAAGACUACAUCCCAA | 209 | 3745 | GGUAAAGACUACAUCCCAA | 209 | 3763 | UUGGGAUGUAGUCUUUACC | 636 |
| 3763 | AUCAAUGCCAUACUGACAG | 210 | 3763 | AUCAAUGCCAUACUGACAG | 210 | 3781 | CUGUCAGUAUGGCAUUGAU | 637 |
| 3781 | GGAAAUAGUGGGUUUACAU | 211 | 3781 | GGAAAUAGUGGGUUUACAU | 211 | 3799 | AUGUAAACCCACUAUUUCC | 638 |
| 3799 | UACUCAACUCCUGCCUUCU | 212 | 3799 | UACUCAACUCCUGCCUUCU | 212 | 3817 | AGAAGGCAGGAGUUGAGUA | 639 |
| 3817 | UCUGAGGACUUCUUCAAGG | 213 | 3817 | UCUGAGGACUUCUUCAAGG | 213 | 3835 | CCUUGAAGAAGUCCUCAGA | 640 |
| 3835 | GAAAGUAUUUCAGCUCCGA | 214 | 3835 | GAAAGUAUUUCAGCUCCGA | 214 | 3853 | UCGGAGCUGAAAUACUUUC | 641 |
| 3853 | AAGUUUAAUUCAGGAAGCU | 215 | 3853 | AAGUUUAAUUCAGGAAGCU | 215 | 3871 | AGCUUCCUGAAUUAAACUU | 642 |
| 3871 | UCUGAUGAUGUCAGAUAUG | 216 | 3871 | UCUGAUGAUGUCAGAUAUG | 216 | 3889 | CAUAUCUGACAUCAUCAGA | 643 |
| 3889 | GUAAAUGCUUUCAAGUUCA | 217 | 3889 | GUAAAUGCUUUCAAGUUCA | 217 | 3907 | UGAACUUGAAAGCAUUUAC | 644 |
| 3907 | AUGAGCCUGGAAAGAAUCA | 218 | 3907 | AUGAGCCUGGAAAGAAUCA | 218 | 3925 | UGAUUCUUUCCAGGCUCAU | 645 |
| 3925 | AAAACCUUUGAAGAACUUU | 219 | 3925 | AAAACCUUUGAAGAACUUU | 219 | 3943 | AAAGUUCUUCAAAGGUUUU | 646 |
| 3943 | UUACCGAAUGCCACCUCCA | 220 | 3943 | UUACCGAAUGCCACCUCCA | 220 | 3961 | UGGAGGUGGCAUUCGGUAA | 647 |
| 3961 | AUGUUUGAUGACUACCAGG | 221 | 3961 | AUGUUUGAUGACUACCAGG | 221 | 3979 | CCUGGUAGUCAUCAAACAU | 648 |
| 3979 | GGCGACAGCAGCACUCUGU | 222 | 3979 | GGCGACAGCAGCACUCUGU | 222 | 3997 | ACAGAGUGCUGCUGUCGCC | 649 |
| 3997 | UUGGCCUCUCCCAUGCUGA | 223 | 3997 | UUGGCCUCUCCCAUGCUGA | 223 | 4015 | UCAGCAUGGGAGAGGCCAA | 650 |
| 4015 | AAGCGCUUCACCUGGACUG | 224 | 4015 | AAGCGCUUCACCUGGACUG | 224 | 4033 | CAGUCCAGGUGAAGCGCUU | 651 |
| 4033 | GACAGCAAACCCAAGGCCU | 225 | 4033 | GACAGCAAACCCAAGGCCU | 225 | 4051 | AGGCCUUGGGUUUGCUGUC | 652 |
| 4051 | UCGCUCAAGAUUGACUUGA | 226 | 4051 | UCGCUCAAGAUUGACUUGA | 226 | 4069 | UCAAGUCAAUCUUGAGCGA | 653 |
| 4069 | AGAGUAACCAGUAAAAGUA | 227 | 4069 | AGAGUAACCAGUAAAAGUA | 227 | 4087 | UACUUUUACUGGUUACUCU | 654 |
| 4087 | AAGGAGUCGGGGCUGUCUG | 228 | 4087 | AAGGAGUCGGGGCUGUCUG | 228 | 4105 | CAGACAGCCCCGACUCCUU | 655 |
| 4105 | GAUGUCAGCAGGCCCAGUU | 229 | 4105 | GAUGUCAGCAGGCCCAGUU | 229 | 4123 | AACUGGGCCUGCUGACAUC | 656 |
| 4123 | UUCUGCCAUUCCAGCUGUG | 230 | 4123 | UUCUGCCAUUCCAGCUGUG | 230 | 4141 | CACAGCUGGAAUGGCAGAA | 657 |
| 4141 | GGGCACGUCAGCGAAGGCA | 231 | 4141 | GGGCACGUCAGCGAAGGCA | 231 | 4159 | UGCCUUCGCUGACGUGCCC | 658 |
| 4159 | AAGCGCAGGUUCACCUACG | 232 | 4159 | AAGCGCAGGUUCACCUACG | 232 | 4177 | CGUAGGUGAACCUGCGCUU | 659 |
| 4177 | GACCACGCUGAGCUGGAAA | 233 | 4177 | GACCACGCUGAGCUGGAAA | 233 | 4195 | UUUCCAGCUCAGCGUGGUC | 660 |
| 4195 | AGGAAAAUCGCGUGCUGCU | 234 | 4195 | AGGAAAAUCGCGUGCUGCU | 234 | 4213 | AGCAGCACGCGAUUUUCCU | 661 |
| 4213 | UCCCCGCCCCCAGACUACA | 235 | 4213 | UCCCCGCCCCCAGACUACA | 235 | 4231 | UGUAGUCUGGGGGCGGGGA | 662 |
| 4231 | AACUCGGUGGUCCUGUACU | 236 | 4231 | AACUCGGUGGUCCUGUACU | 236 | 4249 | AGUACAGGACCACCGAGUU | 663 |
| 4249 | UCCACCCCACCCAUCUAGA | 237 | 4249 | UCCACCCCACCCAUCUAGA | 237 | 4267 | UCUAGAUGGGUGGGGUGGA | 664 |
| 4267 | AGUUUGACACGAAGCCUUA | 238 | 4267 | AGUUUGACACGAAGCCUUA | 238 | 4285 | UAAGGCUUCGUGUCAAACU | 665 |
| 4285 | AUUUCUAGAAGCACAUGUG | 239 | 4285 | AUUUCUAGAAGCACAUGUG | 239 | 4303 | CACAUGUGCUUCUAGAAAU | 666 |
| 4303 | GUAUUUAUACCCCCAGGAA | 240 | 4303 | GUAUUUAUACCCCCAGGAA | 240 | 4321 | UUCCUGGGGGUAUAAAUAC | 667 |
| 4321 | AACUAGCUUUUGCCAGUAU | 241 | 4321 | AACUAGCUUUUGCCAGUAU | 241 | 4339 | AUACUGGCAAAAGCUAGUU | 668 |
| 4339 | UUAUGCAUAUAUAAGUUUA | 242 | 4339 | UUAUGCAUAUAUAAGUUUA | 242 | 4357 | UAAACUUAUAUAUGCAUAA | 669 |
| 4357 | ACACCUUUAUCUUUCCAUG | 243 | 4357 | ACACCUUUAUCUUUCCAUG | 243 | 4375 | CAUGGAAAGAUAAAGGUGU | 670 |
| 4375 | GGGAGCCAGCUGCUUUUUG | 244 | 4375 | GGGAGCCAGCUGCUUUUUG | 244 | 4393 | CAAAAAGCAGCUGGCUCCC | 671 |
| 4393 | GUGAUUUUUUUAAUAGUGC | 245 | 4393 | GUGAUUUUUUUAAUAGUGC | 245 | 4411 | GCACUAUUAAAAAAAUCAC | 672 |
| 4411 | CUUUUUUUUUUUGACUAAC | 246 | 4411 | CUUUUUUUUUUUGACUAAC | 246 | 4429 | GUUAGUCAAAAAAAAAAAG | 673 |
| 4429 | CAAGAAUGUAACUCCAGAU | 247 | 4429 | CAAGAAUGUAACUCCAGAU | 247 | 4447 | AUCUGGAGUUACAUUCUUG | 674 |
| 4447 | UAGAGAAAUAGUGACAAGU | 248 | 4447 | UAGAGAAAUAGUGACAAGU | 248 | 4465 | ACUUGUCACUAUUUCUCUA | 675 |
| 4465 | UGAAGAACACUACUGCUAA | 249 | 4465 | UGAAGAACACUACUGCUAA | 249 | 4483 | UUAGCAGUAGUGUUCUUCA | 676 |
| 4483 | AAUCCUCAUGUUACUCAGU | 250 | 4483 | AAUCCUCAUGUUACUCAGU | 250 | 4501 | ACUGAGUAACAUGAGGAUU | 677 |
| 4501 | UGUUAGAGAAAUCCUUCCU | 251 | 4501 | UGUUAGAGAAAUCCUUCCU | 251 | 4519 | AGGAAGGAUUUCUCUAACA | 678 |
| 4519 | UAAACCCAAUGACUUCCCU | 252 | 4519 | UAAACCCAAUGACUUCCCU | 252 | 4537 | AGGGAAGUCAUUGGGUUUA | 679 |
| 4537 | UGCUCCAACCCCCGCCACC | 253 | 4537 | UGCUCCAACCCCCGCCACC | 253 | 4555 | GGUGGCGGGGGUUGGAGCA | 680 |
| 4555 | CUCAGGGCACGCAGGACCA | 254 | 4555 | CUCAGGGCACGCAGGACCA | 254 | 4573 | UGGUCCUGCGUGCCCUGAG | 681 |
| 4573 | AGUUUGAUUGAGGAGCUGC | 255 | 4573 | AGUUUGAUUGAGGAGCUGC | 255 | 4591 | GCAGCUCCUCAAUCAAACU | 682 |
| 4591 | CACUGAUCACCCAAUGCAU | 256 | 4591 | CACUGAUCACCCAAUGCAU | 256 | 4609 | AUGCAUUGGGUGAUCAGUG | 683 |
| 4609 | UCACGUACCCCACUGGGCC | 257 | 4609 | UCACGUACCCCACUGGGCC | 257 | 4627 | GGCCCAGUGGGGUACGUGA | 684 |
| 4627 | CAGCCCUGCAGCCCAAAAC | 258 | 4627 | CAGCCCUGCAGCCCAAAAC | 258 | 4645 | GUUUUGGGCUGCAGGGCUG | 685 |
| 4645 | CCCAGGGCAACAAGCCCGU | 259 | 4645 | CCCAGGGCAACAAGCCCGU | 259 | 4663 | ACGGGCUUGUUGCCCUGGG | 686 |
| 4663 | UUAGCCCCAGGGGAUCACU | 260 | 4663 | UUAGCCCCAGGGGAUCACU | 260 | 4681 | AGUGAUCCCCUGGGGCUAA | 687 |
| 4681 | UGGCUGGCCUGAGCAACAU | 261 | 4681 | UGGCUGGCCUGAGCAACAU | 261 | 4699 | AUGUUGCUCAGGCCAGCCA | 688 |
| 4699 | UCUCGGGAGUCCUCUAGCA | 262 | 4699 | UCUCGGGAGUCCUCUAGCA | 262 | 4717 | UGCUAGAGGACUCCCGAGA | 689 |
| 4717 | AGGCCUAAGACAUGUGAGG | 263 | 4717 | AGGCCUAAGACAUGUGAGG | 263 | 4735 | CCUCACAUGUCUUAGGCCU | 690 |
| 4735 | GAGGAAAAGGAAAAAAAGC | 264 | 4735 | GAGGAAAAGGAAAAAAAGC | 264 | 4753 | GCUUUUUUUCCUUUUCCUC | 691 |
| 4753 | CAAAAAGCAAGGGAGAAAA | 265 | 4753 | CAAAAAGCAAGGGAGAAAA | 265 | 4771 | UUUUCUCCCUUGCUUUUUG | 692 |
| 4771 | AGAGAAACCGGGAGAAGGC | 266 | 4771 | AGAGAAACCGGGAGAAGGC | 266 | 4789 | GCCUUCUCCCGGUUUCUCU | 693 |
| 4789 | CAUGAGAAAGAAUUUGAGA | 267 | 4789 | CAUGAGAAAGAAUUUGAGA | 267 | 4807 | UCUCAAAUUCUUUCUCAUG | 694 |
| 4807 | ACGCACCAUGUGGGCACGG | 268 | 4807 | ACGCACCAUGUGGGCACGG | 268 | 4825 | CCGUGCCCACAUGGUGCGU | 695 |
| 4825 | GAGGGGGACGGGGCUCAGC | 269 | 4825 | GAGGGGGACGGGGCUCAGC | 269 | 4843 | GCUGAGCCCCGUCCCCCUC | 696 |
| 4843 | CAAUGCCAUUUCAGUGGCU | 270 | 4843 | CAAUGCCAUUUCAGUGGCU | 270 | 4861 | AGCCACUGAAAUGGCAUUG | 697 |
| 4861 | UUCCCAGCUCUGACCCUUC | 271 | 4861 | UUCCCAGCUCUGACCCUUC | 271 | 4879 | GAAGGGUCAGAGCUGGGAA | 698 |
| 4879 | CUACAUUUGAGGGCCCAGC | 272 | 4879 | CUACAUUUGAGGGCCCAGC | 272 | 4897 | GCUGGGCCCUCAAAUGUAG | 699 |
| 4897 | CCAGGAGCAGAUGGACAGC | 273 | 4897 | CCAGGAGCAGAUGGACAGC | 273 | 4915 | GCUGUCCAUCUGCUCCUGG | 700 |
| 4915 | CGAUGAGGGGACAUUUUCU | 274 | 4915 | CGAUGAGGGGACAUUUUCU | 274 | 4933 | AGAAAAUGUCCCCUCAUCG | 701 |
| 4933 | UGGAUUCUGGGAGGCAAGA | 275 | 4933 | UGGAUUCUGGGAGGCAAGA | 275 | 4951 | UCUUGCCUCCCAGAAUCCA | 702 |
| 4951 | AAAAGGACAAAUAUCUUUU | 276 | 4951 | AAAAGGACAAAUAUCUUUU | 276 | 4969 | AAAAGAUAUUUGUCCUUUU | 703 |
| 4969 | UUUGGAACUAAAGCAAAUU | 277 | 4969 | UUUGGAACUAAAGCAAAUU | 277 | 4987 | AAUUUGCUUUAGUUCCAAA | 704 |
| 4987 | UUUAGACCUUUACCUAUGG | 278 | 4987 | UUUAGACCUUUACCUAUGG | 278 | 5005 | CCAUAGGUAAAGGUCUAAA | 705 |
| 5005 | GAAGUGGUUCUAUGUCCAU | 279 | 5005 | GAAGUGGUUCUAUGUCCAU | 279 | 5023 | AUGGACAUAGAACCACUUC | 706 |
| 5023 | UUCUCAUUCGUGGCAUGUU | 280 | 5023 | UUCUCAUUCGUGGCAUGUU | 280 | 5041 | AACAUGCCACGAAUGAGAA | 707 |
| 5041 | UUUGAUUUGUAGCACUGAG | 281 | 5041 | UUUGAUUUGUAGCACUGAG | 281 | 5059 | CUCAGUGCUACAAAUCAAA | 708 |
| 5059 | GGGUGGCACUCAACUCUGA | 282 | 5059 | GGGUGGCACUCAACUCUGA | 282 | 5077 | UCAGAGUUGAGUGCCACCC | 709 |
| 5077 | AGCCCAUACUUUUGGCUCC | 283 | 5077 | AGCCCAUACUUUUGGCUCC | 283 | 5095 | GGAGCCAAAAGUAUGGGCU | 710 |
| 5095 | CUCUAGUAAGAUGCACUGA | 284 | 5095 | CUCUAGUAAGAUGCACUGA | 284 | 5113 | UCAGUGCAUCUUACUAGAG | 711 |
| 5113 | AAAACUUAGCCAGAGUUAG | 285 | 5113 | AAAACUUAGCCAGAGUUAG | 285 | 5131 | CUAACUCUGGCUAAGUUUU | 712 |
| 5131 | GGUUGUCUCCAGGCCAUGA | 286 | 5131 | GGUUGUCUCCAGGCCAUGA | 286 | 5149 | UCAUGGCCUGGAGACAACC | 713 |
| 5149 | AUGGCCUUACACUGAAAAU | 287 | 5149 | AUGGCCUUACACUGAAAAU | 287 | 5167 | AUUUUCAGUGUAAGGCCAU | 714 |
| 5167 | UGUCACAUUCUAUUUUGGG | 288 | 5167 | UGUCACAUUCUAUUUUGGG | 288 | 5185 | CCCAAAAUAGAAUGUGACA | 715 |
| 5185 | GUAUUAAUAUAUAGUCCAG | 289 | 5185 | GUAUUAAUAUAUAGUCCAG | 289 | 5203 | CUGGACUAUAUAUUAAUAC | 716 |
| 5203 | GACACUUAACUCAAUUUCU | 290 | 5203 | GACACUUAACUCAAUUUCU | 290 | 5221 | AGAAAUUGAGUUAAGUGUC | 717 |
| 5221 | UUGGUAUUAUUCUGUUUUG | 291 | 5221 | UUGGUAUUAUUCUGUUUUG | 291 | 5239 | CAAAACAGAAUAAUACCAA | 718 |
| 5239 | GCACAGUUAGUUGUGAAAG | 292 | 5239 | GCACAGUUAGUUGUGAAAG | 292 | 5257 | CUUUCACAACUAACUGUGC | 719 |
| 5257 | GAAAGCUGAGAAGAAUGAA | 293 | 5257 | GAAAGCUGAGAAGAAUGAA | 293 | 5275 | UUCAUUCUUCUCAGCUUUC | 720 |
| 5275 | AAAUGCAGUCCUGAGGAGA | 294 | 5275 | AAAUGCAGUCCUGAGGAGA | 294 | 5293 | UCUCCUCAGGACUGCAUUU | 721 |
| 5293 | AGUUUUCUCCAUAUCAAAA | 295 | 5293 | AGUUUUCUCCAUAUCAAAA | 295 | 5311 | UUUUGAUAUGGAGAAAACU | 722 |
| 5311 | ACGAGGGCUGAUGGAGGAA | 296 | 5311 | ACGAGGGCUGAUGGAGGAA | 296 | 5329 | UUCCUCCAUCAGCCCUCGU | 723 |
| 5329 | AAAAGGUCAAUAAGGUCAA | 297 | 5329 | AAAAGGUCAAUAAGGUCAA | 297 | 5347 | UUGACCUUAUUGACCUUUU | 724 |
| 5347 | AGGGAAGACCCCGUCUCUA | 298 | 5347 | AGGGAAGACCCCGUCUCUA | 298 | 5365 | UAGAGACGGGGUCUUCCCU | 725 |
| 5365 | AUACCAACCAAACCAAUUC | 299 | 5365 | AUACCAACCAAACCAAUUC | 299 | 5383 | GAAUUGGUUUGGUUGGUAU | 726 |
| 5383 | CACCAACACAGUUGGGACC | 300 | 5383 | CACCAACACAGUUGGGACC | 300 | 5401 | GGUCCCAACUGUGUUGGUG | 727 |
| 5401 | CCAAAACACAGGAAGUCAG | 301 | 5401 | CCAAAACACAGGAAGUCAG | 301 | 5419 | CUGACUUCCUGUGUUUUGG | 728 |
| 5419 | GUCACGUUUCCUUUUCAUU | 302 | 5419 | GUCACGUUUCCUUUUCAUU | 302 | 5437 | AAUGAAAAGGAAACGUGAC | 729 |
| 5437 | UUAAUGGGGAUUCCACUAU | 303 | 5437 | UUAAUGGGGAUUCCACUAU | 303 | 5455 | AUAGUGGAAUCCCCAUUAA | 730 |
| 5455 | UCUCACACUAAUCUGAAAG | 304 | 5455 | UCUCACACUAAUCUGAAAG | 304 | 5473 | CUUUCAGAUUAGUGUGAGA | 731 |
| 5473 | GGAUGUGGAAGAGCAUUAG | 305 | 5473 | GGAUGUGGAAGAGCAUUAG | 305 | 5491 | CUAAUGCUCUUCCACAUCC | 732 |
| 5491 | GCUGGCGCAUAUUAAGCAC | 306 | 5491 | GCUGGCGCAUAUUAAGCAC | 306 | 5509 | GUGCUUAAUAUGCGCCAGC | 733 |
| 5509 | CUUUAAGCUCCUUGAGUAA | 307 | 5509 | CUUUAAGCUCCUUGAGUAA | 307 | 5527 | UUACUCAAGGAGCUUAAAG | 734 |
| 5527 | AAAAGGUGGUAUGUAAUUU | 308 | 5527 | AAAAGGUGGUAUGUAAUUU | 308 | 5545 | AAAUUACAUACCACCUUUU | 735 |
| 5545 | UAUGCAAGGUAUUUCUCCA | 309 | 5545 | UAUGCAAGGUAUUUCUCCA | 309 | 5563 | UGGAGAAAUACCUUGCAUA | 736 |
| 5563 | AGUUGGGACUCAGGAUAUU | 310 | 5563 | AGUUGGGACUCAGGAUAUU | 310 | 5581 | AAUAUCCUGAGUCCCAACU | 737 |
| 5581 | UAGUUAAUGAGCCAUCACU | 311 | 5581 | UAGUUAAUGAGCCAUCACU | 311 | 5599 | AGUGAUGGCUCAUUAACUA | 738 |
| 5599 | UAGAAGAAAAGCCCAUUUU | 312 | 5599 | UAGAAGAAAAGCCCAUUUU | 312 | 5617 | AAAAUGGGCUUUUCUUCUA | 739 |
| 5617 | UCAACUGCUUUGAAACUUG | 313 | 5617 | UCAACUGCUUUGAAACUUG | 313 | 5635 | CAAGUUUCAAAGCAGUUGA | 740 |
| 5635 | GCCUGGGGUCUGAGCAUGA | 314 | 5635 | GCCUGGGGUCUGAGCAUGA | 314 | 5653 | UCAUGCUCAGACCCCAGGC | 741 |
| 5653 | AUGGGAAUAGGGAGACAGG | 315 | 5653 | AUGGGAAUAGGGAGACAGG | 315 | 5671 | CCUGUCUCCCUAUUCCCAU | 742 |
| 5671 | GGUAGGAAAGGGCGCCUAC | 316 | 5671 | GGUAGGAAAGGGCGCCUAC | 316 | 5689 | GUAGGCGCCCUUUCCUACC | 743 |
| 5689 | CUCUUCAGGGUCUAAAGAU | 317 | 5689 | CUCUUCAGGGUCUAAAGAU | 317 | 5707 | AUCUUUAGACCCUGAAGAG | 744 |
| 5707 | UCAAGUGGGCCUUGGAUCG | 318 | 5707 | UCAAGUGGGCCUUGGAUCG | 318 | 5725 | CGAUCCAAGGCCCACUUGA | 745 |
| 5725 | GCUAAGCUGGCUCUGUUUG | 319 | 5725 | GCUAAGCUGGCUCUGUUUG | 319 | 5743 | CAAACAGAGCCAGCUUAGC | 746 |
| 5743 | GAUGCUAUUUAUGCAAGUU | 320 | 5743 | GAUGCUAUUUAUGCAAGUU | 320 | 5761 | AACUUGCAUAAAUAGCAUC | 747 |
| 5761 | UAGGGUCUAUGUAUUUAGG | 321 | 5761 | UAGGGUCUAUGUAUUUAGG | 321 | 5779 | CCUAAAUACAUAGACCCUA | 748 |
| 5779 | GAUGCGCCUACUCUUCAGG | 322 | 5779 | GAUGCGCCUACUCUUCAGG | 322 | 5797 | CCUGAAGAGUAGGCGCAUC | 749 |
| 5797 | GGUCUAAAGAUCAAGUGGG | 323 | 5797 | GGUCUAAAGAUCAAGUGGG | 323 | 5815 | CCCACUUGAUCUUUAGACC | 750 |
| 5815 | GCCUUGGAUCGCUAAGCUG | 324 | 5815 | GCCUUGGAUCGCUAAGCUG | 324 | 5833 | CAGCUUAGCGAUCCAAGGC | 751 |
| 5833 | GGCUCUGUUUGAUGCUAUU | 325 | 5833 | GGCUCUGUUUGAUGCUAUU | 325 | 5851 | AAUAGCAUCAAACAGAGCC | 752 |
| 5851 | UUAUGCAAGUUAGGGUCUA | 326 | 5851 | UUAUGCAAGUUAGGGUCUA | 326 | 5869 | UAGACCCUAACUUGCAUAA | 753 |
| 5869 | AUGUAUUUAGGAUGUCUGC | 327 | 5869 | AUGUAUUUAGGAUGUCUGC | 327 | 5887 | GCAGACAUCCUAAAUACAU | 754 |
| 5887 | CACCUUCUGCAGCCAGUCA | 328 | 5887 | CACCUUCUGCAGCCAGUCA | 328 | 5905 | UGACUGGCUGCAGAAGGUG | 755 |
| 5905 | AGAAGCUGGAGAGGCAACA | 329 | 5905 | AGAAGCUGGAGAGGCAACA | 329 | 5923 | UGUUGCCUCUCCAGCUUCU | 756 |
| 5923 | AGUGGAUUGCUGCUUCUUG | 330 | 5923 | AGUGGAUUGCUGCUUCUUG | 330 | 5941 | CAAGAAGCAGCAAUCCACU | 757 |
| 5941 | GGGGAGAAGAGUAUGCUUC | 331 | 5941 | GGGGAGAAGAGUAUGCUUC | 331 | 5959 | GAAGCAUACUCUUCUCCCC | 758 |
| 5959 | CCUUUUAUCCAUGUAAUUU | 332 | 5959 | CCUUUUAUCCAUGUAAUUU | 332 | 5977 | AAAUUACAUGGAUAAAAGG | 759 |
| 5977 | UAACUGUAGAACCUGAGCU | 333 | 5977 | UAACUGUAGAACCUGAGCU | 333 | 5995 | AGCUCAGGUUCUACAGUUA | 760 |
| 5995 | UCUAAGUAACCGAAGAAUG | 334 | 5995 | UCUAAGUAACCGAAGAAUG | 334 | 6013 | CAUUCUUCGGUUACUUAGA | 761 |
| 6013 | GUAUGCCUCUGUUCUUAUG | 335 | 6013 | GUAUGCCUCUGUUCUUAUG | 335 | 6031 | CAUAAGAACAGAGGCAUAC | 762 |
| 6031 | GUGCCACAUCCUUGUUUAA | 336 | 6031 | GUGCCACAUCCUUGUUUAA | 336 | 6049 | UUAAACAAGGAUGUGGCAC | 763 |
| 6049 | AAGGCUCUCUGUAUGAAGA | 337 | 6049 | AAGGCUCUCUGUAUGAAGA | 337 | 6067 | UCUUCAUACAGAGAGCCUU | 764 |
| 6067 | AGAUGGGACCGUCAUCAGC | 338 | 6067 | AGAUGGGACCGUCAUCAGC | 338 | 6085 | GCUGAUGACGGUCCCAUCU | 765 |
| 6085 | CACAUUCCCUAGUGAGCCU | 339 | 6085 | CACAUUCCCUAGUGAGCCU | 339 | 6103 | AGGCUCACUAGGGAAUGUG | 766 |
| 6103 | UACUGGCUCCUGGCAGCGG | 340 | 6103 | UACUGGCUCCUGGCAGCGG | 340 | 6121 | CCGCUGCCAGGAGCCAGUA | 767 |
| 6121 | GCUUUUGUGGAAGACUCAC | 341 | 6121 | GCUUUUGUGGAAGACUCAC | 341 | 6139 | GUGAGUCUUCCACAAAAGC | 768 |
| 6139 | CUAGCCAGAAGAGAGGAGU | 342 | 6139 | CUAGCCAGAAGAGAGGAGU | 342 | 6157 | ACUCCUCUCUUCUGGCUAG | 769 |
| 6157 | UGGGACAGUCCUCUCCACC | 343 | 6157 | UGGGACAGUCCUCUCCACC | 343 | 6175 | GGUGGAGAGGACUGUCCCA | 770 |
| 6175 | CAAGAUCUAAAUCCAAACA | 344 | 6175 | CAAGAUCUAAAUCCAAACA | 344 | 6193 | UGUUUGGAUUUAGAUCUUG | 771 |
| 6193 | AAAAGCAGGCUAGAGCCAG | 345 | 6193 | AAAAGCAGGCUAGAGCCAG | 345 | 6211 | CUGGCUCUAGCCUGCUUUU | 772 |
| 6211 | GAAGAGAGGACAAAUCUUU | 346 | 6211 | GAAGAGAGGACAAAUCUUU | 346 | 6229 | AAAGAUUUGUCCUCUCUUC | 773 |
| 6229 | UGUUGUUCCUCUUCUUUAC | 347 | 6229 | UGUUGUUCCUCUUCUUUAC | 347 | 6247 | GUAAAGAAGAGGAACAACA | 774 |
| 6247 | CACAUACGCAAACCACCUG | 348 | 6247 | CACAUACGCAAACCACCUG | 348 | 6265 | CAGGUGGUUUGCGUAUGUG | 775 |
| 6265 | GUGACAGCUGGCAAUUUUA | 349 | 6265 | GUGACAGCUGGCAAUUUUA | 349 | 6283 | UAAAAUUGCCAGCUGUCAC | 776 |
| 6283 | AUAAAUCAGGUAACUGGAA | 350 | 6283 | AUAAAUCAGGUAACUGGAA | 350 | 6301 | UUCCAGUUACCUGAUUUAU | 777 |
| 6301 | AGGAGGUUAAACUCAGAAA | 351 | 6301 | AGGAGGUUAAACUCAGAAA | 351 | 6319 | UUUCUGAGUUUAACCUCCU | 778 |
| 6319 | AAAAGAAGACCUCAGUCAA | 352 | 6319 | AAAAGAAGACCUCAGUCAA | 352 | 6337 | UUGACUGAGGUCUUCUUUU | 779 |
| 6337 | AUUCUCUACUUUUUUUUUU | 353 | 6337 | AUUCUCUACUUUUUUUUUU | 353 | 6355 | AAAAAAAAAAGUAGAGAAU | 780 |
| 6355 | UUUUUUUCCAAAUCAGAUA | 354 | 6355 | UUUUUUUCCAAAUCAGAUA | 354 | 6373 | UAUCUGAUUUGGAAAAAAA | 781 |
| 6373 | AAUAGCCCAGCAAAUAGUG | 355 | 6373 | AAUAGCCCAGCAAAUAGUG | 355 | 6391 | CACUAUUUGCUGGGCUAUU | 782 |
| 6391 | GAUAACAAAUAAAACCUUA | 356 | 6391 | GAUAACAAAUAAAACCUUA | 356 | 6409 | UAAGGUUUUAUUUGUUAUC | 783 |
| 6409 | AGCUGUUCAUGUCUUGAUU | 357 | 6409 | AGCUGUUCAUGUCUUGAUU | 357 | 6427 | AAUCAAGACAUGAACAGCU | 784 |
| 6427 | UUCAAUAAUUAAUUCUUAA | 358 | 6427 | UUCAAUAAUUAAUUCUUAA | 358 | 6445 | UUAAGAAUUAAUUAUUGAA | 785 |
| 6445 | AUCAUUAAGAGACCAUAAU | 359 | 6445 | AUCAUUAAGAGACCAUAAU | 359 | 6463 | AUUAUGGUCUCUUAAUGAU | 786 |
| 6463 | UAAAUACUCCUUUUCAAGA | 360 | 6463 | UAAAUACUCCUUUUCAAGA | 360 | 6481 | UCUUGAAAAGGAGUAUUUA | 787 |
| 6481 | AGAAAAGCAAAACCAUUAG | 361 | 6481 | AGAAAAGCAAAACCAUUAG | 361 | 6499 | CUAAUGGUUUUGCUUUUCU | 788 |
| 6499 | GAAUUGUUACUCAGCUCCU | 362 | 6499 | GAAUUGUUACUCAGCUCCU | 362 | 6517 | AGGAGCUGAGUAACAAUUC | 789 |
| 6517 | UUCAAACUCAGGUUUGUAG | 363 | 6517 | UUCAAACUCAGGUUUGUAG | 363 | 6535 | CUACAAACCUGAGUUUGAA | 790 |
| 6535 | GCAUACAUGAGUCCAUCCA | 364 | 6535 | GCAUACAUGAGUCCAUCCA | 364 | 6553 | UGGAUGGACUCAUGUAUGC | 791 |
| 6553 | AUCAGUCAAAGAAUGGUUC | 365 | 6553 | AUCAGUCAAAGAAUGGUUC | 365 | 6571 | GAACCAUUCUUUGACUGAU | 792 |
| 6571 | CCAUCUGGAGUCUUAAUGU | 366 | 6571 | CCAUCUGGAGUCUUAAUGU | 366 | 6589 | ACAUUAAGACUCCAGAUGG | 793 |
| 6589 | UAGAAAGAAAAAUGGAGAC | 367 | 6589 | UAGAAAGAAAAAUGGAGAC | 367 | 6607 | GUCUCCAUUUUUCUUUCUA | 794 |
| 6607 | CUUGUAAUAAUGAGCUAGU | 368 | 6607 | CUUGUAAUAAUGAGCUAGU | 368 | 6625 | ACUAGCUCAUUAUUACAAG | 795 |
| 6625 | UUACAAAGUGCUUGUUCAU | 369 | 6625 | UUACAAAGUGCUUGUUCAU | 369 | 6643 | AUGAACAAGCACUUUGUAA | 796 |
| 6643 | UUAAAAUAGCACUGAAAAU | 370 | 6643 | UUAAAAUAGCACUGAAAAU | 370 | 6661 | AUUUUCAGUGCUAUUUUAA | 797 |
| 6661 | UUGAAACAUGAAUUAACUG | 371 | 6661 | UUGAAACAUGAAUUAACUG | 371 | 6679 | CAGUUAAUUCAUGUUUCAA | 798 |
| 6679 | GAUAAUAUUCCAAUCAUUU | 372 | 6679 | GAUAAUAUUCCAAUCAUUU | 372 | 6697 | AAAUGAUUGGAAUAUUAUC | 799 |
| 6697 | UGCCAUUUAUGACAAAAAU | 373 | 6697 | UGCCAUUUAUGACAAAAAU | 373 | 6715 | AUUUUUGUCAUAAAUGGCA | 800 |
| 6715 | UGGUUGGCACUAACAAAGA | 374 | 6715 | UGGUUGGCACUAACAAAGA | 374 | 6733 | UCUUUGUUAGUGCCAACCA | 801 |
| 6733 | AACGAGCACUUCCUUUCAG | 375 | 6733 | AACGAGCACUUCCUUUCAG | 375 | 6751 | CUGAAAGGAAGUGCUCGUU | 802 |
| 6751 | GAGUUUCUGAGAUAAUGUA | 376 | 6751 | GAGUUUCUGAGAUAAUGUA | 376 | 6769 | UACAUUAUCUCAGAAACUC | 803 |
| 6769 | ACGUGGAACAGUCUGGGUG | 377 | 6769 | ACGUGGAACAGUCUGGGUG | 377 | 6787 | CACCCAGACUGUUCCACGU | 804 |
| 6787 | GGAAUGGGGCUGAAACCAU | 378 | 6787 | GGAAUGGGGCUGAAACCAU | 378 | 6805 | AUGGUUUCAGCCCCAUUCC | 805 |
| 6805 | UGUGCAAGUCUGUGUCUUG | 379 | 6805 | UGUGCAAGUCUGUGUCUUG | 379 | 6823 | CAAGACACAGACUUGCACA | 806 |
| 6823 | GUCAGUCCAAGAAGUGACA | 380 | 6823 | GUCAGUCCAAGAAGUGACA | 380 | 6841 | UGUCACUUCUUGGACUGAC | 807 |
| 6841 | ACCGAGAUGUUAAUUUUAG | 381 | 6841 | ACCGAGAUGUUAAUUUUAG | 381 | 6859 | CUAAAAUUAACAUCUCGGU | 808 |
| 6859 | GGGACCCGUGCCUUGUUUC | 382 | 6859 | GGGACCCGUGCCUUGUUUC | 382 | 6877 | GAAACAAGGCACGGGUCCC | 809 |
| 6877 | CCUAGCCCACAAGAAUGCA | 383 | 6877 | CCUAGCCCACAAGAAUGCA | 383 | 6895 | UGCAUUCUUGUGGGCUAGG | 810 |
| 6895 | AAACAUCAAACAGAUACUC | 384 | 6895 | AAACAUCAAACAGAUACUC | 384 | 6913 | GAGUAUCUGUUUGAUGUUU | 811 |
| 6913 | CGCUAGCCUCAUUUAAAUU | 385 | 6913 | CGCUAGCCUCAUUUAAAUU | 385 | 6931 | AAUUUAAAUGAGGCUAGCG | 812 |
| 6931 | UGAUUAAAGGAGGAGUGCA | 386 | 6931 | UGAUUAAAGGAGGAGUGCA | 386 | 6949 | UGCACUCCUCCUUUAAUCA | 813 |
| 6949 | AUCUUUGGCCGACAGUGGU | 387 | 6949 | AUCUUUGGCCGACAGUGGU | 387 | 6967 | ACCACUGUCGGCCAAAGAU | 814 |
| 6967 | UGUAACUGUGUGUGUGUGU | 388 | 6967 | UGUAACUGUGUGUGUGUGU | 388 | 6985 | ACACACACACACAGUUACA | 815 |
| 6985 | UGUGUGUGUGUGUGUGUGU | 389 | 6985 | UGUGUGUGUGUGUGUGUGU | 389 | 7003 | ACACACACACACACACACA | 816 |
| 7003 | UGUGUGUGUGUGGGUGUGG | 390 | 7003 | UGUGUGUGUGUGGGUGUGG | 390 | 7021 | CCACACCCACACACACACA | 817 |
| 7021 | GGUGUAUGUGUGUUUUGUG | 391 | 7021 | GGUGUAUGUGUGUUUUGUG | 391 | 7039 | CACAAAACACACAUACACC | 818 |
| 7039 | GCAUAACUAUUUAAGGAAA | 392 | 7039 | GCAUAACUAUUUAAGGAAA | 392 | 7057 | UUUCCUUAAAUAGUUAUGC | 819 |
| 7057 | ACUGGAAUUUUAAAGUUAC | 393 | 7057 | ACUGGAAUUUUAAAGUUAC | 393 | 7075 | GUAACUUUAAAAUUCCAGU | 820 |
| 7075 | CUUUUAUACAAACCAAGAA | 394 | 7075 | CUUUUAUACAAACCAAGAA | 394 | 7093 | UUCUUGGUUUGUAUAAAAG | 821 |
| 7093 | AUAUAUGCUACAGAUAUAA | 395 | 7093 | AUAUAUGCUACAGAUAUAA | 395 | 7111 | UUAUAUCUGUAGCAUAUAU | 822 |
| 7111 | AGACAGACAUGGUUUGGUC | 396 | 7111 | AGACAGACAUGGUUUGGUC | 396 | 7129 | GACCAAACCAUGUCUGUCU | 823 |
| 7129 | CCUAUAUUUCUAGUCAUGA | 397 | 7129 | CCUAUAUUUCUAGUCAUGA | 397 | 7147 | UCAUGACUAGAAAUAUAGG | 824 |
| 7147 | AUGAAUGUAUUUUGUAUAC | 398 | 7147 | AUGAAUGUAUUUUGUAUAC | 398 | 7165 | GUAUACAAAAUACAUUCAU | 825 |
| 7165 | CCAUCUUCAUAUAAUAUAC | 399 | 7165 | CCAUCUUCAUAUAAUAUAC | 399 | 7183 | GUAUAUUAUAUGAAGAUGG | 826 |
| 7183 | CUUAAAAAUAUUUCUUAAU | 400 | 7183 | CUUAAAAAUAUUUCUUAAU | 400 | 7201 | AUUAAGAAAUAUUUUUAAG | 827 |
| 7201 | UUGGGAUUUGUAAUCGUAC | 401 | 7201 | UUGGGAUUUGUAAUCGUAC | 401 | 7219 | GUACGAUUACAAAUCCCAA | 828 |
| 7219 | CCAACUUAAUUGAUAAACU | 402 | 7219 | CCAACUUAAUUGAUAAACU | 402 | 7237 | AGUUUAUCAAUUAAGUUGG | 829 |
| 7237 | UUGGCAACUGCUUUUAUGU | 403 | 7237 | UUGGCAACUGCUUUUAUGU | 403 | 7255 | ACAUAAAAGCAGUUGCCAA | 830 |
| 7255 | UUCUGUCUCCUUCCAUAAA | 404 | 7255 | UUCUGUCUCCUUCCAUAAA | 404 | 7273 | UUUAUGGAAGGAGACAGAA | 831 |
| 7273 | AUUUUUCAAAAUACUAAUU | 405 | 7273 | AUUUUUCAAAAUACUAAUU | 405 | 7291 | AAUUAGUAUUUUGAAAAAU | 832 |
| 7291 | UCAACAAAGAAAAAGCUCU | 406 | 7291 | UCAACAAAGAAAAAGCUCU | 406 | 7309 | AGAGCUUUUUCUUUGUUGA | 833 |
| 7309 | UUUUUUUUCCUAAAAUAAA | 407 | 7309 | UUUUUUUUCCUAAAAUAAA | 407 | 7327 | UUUAUUUUAGGAAAAAAAA | 834 |
| 7327 | ACUCAAAUUUAUCCUUGUU | 408 | 7327 | ACUCAAAUUUAUCCUUGUU | 408 | 7345 | AACAAGGAUAAAUUUGAGU | 835 |
| 7345 | UUAGAGCAGAGAAAAAUUA | 409 | 7345 | UUAGAGCAGAGAAAAAUUA | 409 | 7363 | UAAUUUUUCUCUGCUCUAA | 836 |
| 7363 | AAGAAAAACUUUGAAAUGG | 410 | 7363 | AAGAAAAACUUUGAAAUGG | 410 | 7381 | CCAUUUCAAAGUUUUUCUU | 837 |
| 7381 | GUCUCAAAAAAUUGCUAAA | 411 | 7381 | GUCUCAAAAAAUUGCUAAA | 411 | 7399 | UUUAGCAAUUUUUUGAGAC | 838 |
| 7399 | AUAUUUUCAAUGGAAAACU | 412 | 7399 | AUAUUUUCAAUGGAAAACU | 412 | 7417 | AGUUUUCCAUUGAAAAUAU | 839 |
| 7417 | UAAAUGUUAGUUUAGCUGA | 413 | 7417 | UAAAUGUUAGUUUAGCUGA | 413 | 7435 | UCAGCUAAACUAACAUUUA | 840 |
| 7435 | AUUGUAUGGGGUUUUCGAA | 414 | 7435 | AUUGUAUGGGGUUUUCGAA | 414 | 7453 | UUCGAAAACCCCAUACAAU | 841 |
| 7453 | ACCUUUCACUUUUUGUUUG | 415 | 7453 | ACCUUUCACUUUUUGUUUG | 415 | 7471 | CAAACAAAAAGUGAAAGGU | 842 |
| 7471 | GUUUUACCUAUUUCACAAC | 416 | 7471 | GUUUUACCUAUUUCACAAC | 416 | 7489 | GUUGUGAAAUAGGUAAAAC | 843 |
| 7489 | CUGUGUAAAUUGCCAAUAA | 417 | 7489 | CUGUGUAAAUUGCCAAUAA | 417 | 7507 | UUAUUGGCAAUUUACACAG | 844 |
| 7507 | AUUCCUGUCCAUGAAAAUG | 418 | 7507 | AUUCCUGUCCAUGAAAAUG | 418 | 7525 | CAUUUUCAUGGACAGGAAU | 845 |
| 7525 | GCAAAUUAUCCAGUGUAGA | 419 | 7525 | GCAAAUUAUCCAGUGUAGA | 419 | 7543 | UCUACACUGGAUAAUUUGC | 846 |
| 7543 | AUAUAUUUGACCAUCACCC | 420 | 7543 | AUAUAUUUGACCAUCACCC | 420 | 7561 | GGGUGAUGGUCAAAUAUAU | 847 |
| 7561 | CUAUGGAUAUUGGCUAGUU | 421 | 7561 | CUAUGGAUAUUGGCUAGUU | 421 | 7579 | AACUAGCCAAUAUCCAUAG | 848 |
| 7579 | UUUGCCUUUAUUAAGCAAA | 422 | 7579 | UUUGCCUUUAUUAAGCAAA | 422 | 7597 | UUUGCUUAAUAAAGGCAAA | 849 |
| 7597 | AUUCAUUUCAGCCUGAAUG | 423 | 7597 | AUUCAUUUCAGCCUGAAUG | 423 | 7615 | CAUUCAGGCUGAAAUGAAU | 850 |
| 7615 | GUCUGCCUAUAUAUUCUCU | 424 | 7615 | GUCUGCCUAUAUAUUCUCU | 424 | 7633 | AGAGAAUAUAUAGGCAGAC | 851 |
| 7633 | UGCUCUUUGUAUUCUCCUU | 425 | 7633 | UGCUCUUUGUAUUCUCCUU | 425 | 7651 | AAGGAGAAUACAAAGAGCA | 852 |
| 7651 | UUGAACCCGUUAAAACAUC | 426 | 7651 | UUGAACCCGUUAAAACAUC | 426 | 7669 | GAUGUUUUAACGGGUUCAA | 853 |
| 7662 | AAAACAUCCUGUGGCACUC | 427 | 7662 | AAAACAUCCUGUGGCACUC | 427 | 7680 | GAGUGCCACAGGAUGUUUU | 854 |

VEGFR2/KDR NM_002253.1

| | | |
|---|---|---|
| Seq | Seq | Seq |

| | | | | | | | | |
|---|---|---|---|---|---|---|---|---|
| Pos | Target Sequence | ID | UPos | Upper seq | ID | LPos | Lower seq | ID |

| | | | | | | | | |
|---|---|---|---|---|---|---|---|---|
| 1 | ACUGAGUCCCGGGACCCCG | 855 | 1 | ACUGAGUCCCGGGACCCCG | 855 | 19 | CGGGGUCCCGGGACUCAGU | 1179 |
| 19 | GGGAGAGCGGUCAGUGUGU | 856 | 19 | GGGAGAGCGGUCAGUGUGU | 856 | 37 | ACACACUGACCGCUCUCCC | 1180 |
| 37 | UGGUCGCUGCGUUUCCUCU | 857 | 37 | UGGUCGCUGCGUUUCCUCU | 857 | 55 | AGAGGAAACGCAGCGACCA | 1181 |
| 55 | UGCCUGCGCCGGGCAUCAC | 858 | 55 | UGCCUGCGCCGGGCAUCAC | 858 | 73 | GUGAUGCCCGGCGCAGGCA | 1182 |
| 73 | CUUGCGCGCCGCAGAAAGU | 859 | 73 | CUUGCGCGCCGCAGAAAGU | 859 | 91 | ACUUUCUGCGGCGCGCAAG | 1183 |
| 91 | UCCGUCUGGCAGCCUGGAU | 860 | 91 | UCCGUCUGGCAGCCUGGAU | 860 | 109 | AUCCAGGCUGCCAGACGGA | 1184 |
| 109 | UAUCCUCUCCUACCGGCAC | 861 | 109 | UAUCCUCUCCUACCGGCAC | 861 | 127 | GUGCCGGUAGGAGAGGAUA | 1185 |
| 127 | CCCGCAGACGCCCCUGCAG | 862 | 127 | CCCGCAGACGCCCCUGCAG | 862 | 145 | CUGCAGGGGCGUCUGCGGG | 1186 |
| 145 | GCCGCCGGUCGGCGCCCGG | 863 | 145 | GCCGCCGGUCGGCGCCCGG | 863 | 163 | CCGGGCGCCGACCGGCGGC | 1187 |
| 163 | GGCUCCCUAGCCCUGUGCG | 864 | 163 | GGCUCCCUAGCCCUGUGCG | 864 | 181 | CGCACAGGGCUAGGGAGCC | 1188 |
| 181 | GCUCAACUGUCCUGCGCUG | 865 | 181 | GCUCAACUGUCCUGCGCUG | 865 | 199 | CAGCGCAGGACAGUUGAGC | 1189 |
| 199 | GCGGGGUGCCGCGAGUUCC | 866 | 199 | GCGGGGUGCCGCGAGUUCC | 866 | 217 | GGAACUCGCGGCACCCCGC | 1190 |
| 217 | CACCUCCGCGCCUCCUUCU | 867 | 217 | CACCUCCGCGCCUCCUUCU | 867 | 235 | AGAAGGAGGCGCGGAGGUG | 1191 |
| 235 | UCUAGACAGGCGCUGGGAG | 868 | 235 | UCUAGACAGGCGCUGGGAG | 868 | 253 | CUCCCAGCGCCUGUCUAGA | 1192 |
| 253 | GAAAGAACCGGCUCCCGAG | 869 | 253 | GAAAGAACCGGCUCCCGAG | 869 | 271 | CUCGGGAGCCGGUUCUUUC | 1193 |
| 271 | GUUCUGGGCAUUUCGCCCG | 870 | 271 | GUUCUGGGCAUUUCGCCCG | 870 | 289 | CGGGCGAAAUGCCCAGAAC | 1194 |
| 289 | GGCUCGAGGUGCAGGAUGC | 871 | 289 | GGCUCGAGGUGCAGGAUGC | 871 | 307 | GCAUCCUGCACCUCGAGCC | 1195 |
| 307 | CAGAGCAAGGUGCUGCUGG | 872 | 307 | CAGAGCAAGGUGCUGCUGG | 872 | 325 | CCAGCAGCACCUUGCUCUG | 1196 |
| 325 | GCCGUCGCCCUGUGGCUCU | 873 | 325 | GCCGUCGCCCUGUGGCUCU | 873 | 343 | AGAGCCACAGGGCGACGGC | 1197 |
| 343 | UGCGUGGAGACCCGGGCCG | 874 | 343 | UGCGUGGAGACCCGGGCCG | 874 | 361 | CGGCCCGGGUCUCCACGCA | 1198 |
| 361 | GCCUCUGUGGGUUUGCCUA | 875 | 361 | GCCUCUGUGGGUUUGCCUA | 875 | 379 | UAGGCAAACCCACAGAGGC | 1199 |
| 379 | AGUGUUUCUCUUGAUCUGC | 876 | 379 | AGUGUUUCUCUUGAUCUGC | 876 | 397 | GCAGAUCAAGAGAAACACU | 1200 |
| 397 | CCCAGGCUCAGCAUACAAA | 877 | 397 | CCCAGGCUCAGCAUACAAA | 877 | 415 | UUUGUAUGCUGAGCCUGGG | 1201 |
| 415 | AAAGACAUACUUACAAUUA | 878 | 415 | AAAGACAUACUUACAAUUA | 878 | 433 | UAAUUGUAAGUAUGUCUUU | 1202 |
| 433 | AAGGCUAAUACAACUCUUC | 879 | 433 | AAGGCUAAUACAACUCUUC | 879 | 451 | GAAGAGUUGUAUUAGCCUU | 1203 |
| 451 | CAAAUUACUUGCAGGGGAC | 880 | 451 | CAAAUUACUUGCAGGGGAC | 880 | 469 | GUCCCCUGCAAGUAAUUUG | 1204 |
| 469 | CAGAGGGACUUGGACUGGC | 881 | 469 | CAGAGGGACUUGGACUGGC | 881 | 487 | GCCAGUCCAAGUCCCUCUG | 1205 |
| 487 | CUUUGGCCCAAUAAUCAGA | 882 | 487 | CUUUGGCCCAAUAAUCAGA | 882 | 505 | UCUGAUUAUUGGGCCAAAG | 1206 |
| 505 | AGUGGCAGUGAGCAAAGGG | 883 | 505 | AGUGGCAGUGAGCAAAGGG | 883 | 523 | CCCUUUGCUCACUGCCACU | 1207 |
| 523 | GUGGAGGUGACUGAGUGCA | 884 | 523 | GUGGAGGUGACUGAGUGCA | 884 | 541 | UGCACUCAGUCACCUCCAC | 1208 |
| 541 | AGCGAUGGCCUCUUCUGUA | 885 | 541 | AGCGAUGGCCUCUUCUGUA | 885 | 559 | UACAGAAGAGGCCAUCGCU | 1209 |
| 559 | AAGACACUCACAAUUCCAA | 886 | 559 | AAGACACUCACAAUUCCAA | 886 | 577 | UUGGAAUUGUGAGUGUCUU | 1210 |
| 577 | AAAGUGAUCGGAAAUGACA | 887 | 577 | AAAGUGAUCGGAAAUGACA | 887 | 595 | UGUCAUUUCCGAUCACUUU | 1211 |
| 595 | ACUGGAGCCUACAAGUGCU | 888 | 595 | ACUGGAGCCUACAAGUGCU | 888 | 613 | AGCACUUGUAGGCUCCAGU | 1212 |
| 613 | UUCUACCGGGAAACUGACU | 889 | 613 | UUCUACCGGGAAACUGACU | 889 | 631 | AGUCAGUUUCCCGGUAGAA | 1213 |
| 631 | UUGGCCUCGGUCAUUUAUG | 890 | 631 | UUGGCCUCGGUCAUUUAUG | 890 | 649 | CAUAAAUGACCGAGGCCAA | 1214 |
| 649 | GUCUAUGUUCAAGAUUACA | 891 | 649 | GUCUAUGUUCAAGAUUACA | 891 | 667 | UGUAAUCUUGAACAUAGAC | 1215 |
| 667 | AGAUCUCCAUUUAUUGCUU | 892 | 667 | AGAUCUCCAUUUAUUGCUU | 892 | 685 | AAGCAAUAAAUGGAGAUCU | 1216 |
| 685 | UCUGUUAGUGACCAACAUG | 893 | 685 | UCUGUUAGUGACCAACAUG | 893 | 703 | CAUGUUGGUCACUAACAGA | 1217 |
| 703 | GGAGUCGUGUACAUUACUG | 894 | 703 | GGAGUCGUGUACAUUACUG | 894 | 721 | CAGUAAUGUACACGACUCC | 1218 |
| 721 | GAGAACAAAAACAAAACUG | 895 | 721 | GAGAACAAAAACAAAACUG | 895 | 739 | CAGUUUUGUUUUUGUUCUC | 1219 |
| 739 | GUGGUGAUUCCAUGUCUCG | 896 | 739 | GUGGUGAUUCCAUGUCUCG | 896 | 757 | CGAGACAUGGAAUCACCAC | 1220 |
| 757 | GGGUCCAUUUCAAAUCUCA | 897 | 757 | GGGUCCAUUUCAAAUCUCA | 897 | 775 | UGAGAUUUGAAAUGGACCC | 1221 |
| 775 | AACGUGUCACUUUGUGCAA | 898 | 775 | AACGUGUCACUUUGUGCAA | 898 | 793 | UUGCACAAAGUGACACGUU | 1222 |
| 793 | AGAUACCCAGAAAAGAGAU | 899 | 793 | AGAUACCCAGAAAAGAGAU | 899 | 811 | AUCUCUUUUCUGGGUAUCU | 1223 |
| 811 | UUUGUUCCUGAUGGUAACA | 900 | 811 | UUUGUUCCUGAUGGUAACA | 900 | 829 | UGUUACCAUCAGGAACAAA | 1224 |
| 829 | AGAAUUUCCUGGGACAGCA | 901 | 829 | AGAAUUUCCUGGGACAGCA | 901 | 847 | UGCUGUCCCAGGAAAUUCU | 1225 |
| 847 | AAGAAGGGCUUUACUAUUC | 902 | 847 | AAGAAGGGCUUUACUAUUC | 902 | 865 | GAAUAGUAAAGCCCUUCUU | 1226 |
| 865 | CCCAGCUACAUGAUCAGCU | 903 | 865 | CCCAGCUACAUGAUCAGCU | 903 | 883 | AGCUGAUCAUGUAGCUGGG | 1227 |
| 883 | UAUGCUGGCAUGGUCUUCU | 904 | 883 | UAUGCUGGCAUGGUCUUCU | 904 | 901 | AGAAGACCAUGCCAGCAUA | 1228 |
| 901 | UGUGAAGCAAAAAUUAAUG | 905 | 901 | UGUGAAGCAAAAAUUAAUG | 905 | 919 | CAUUAAUUUUUGCUUCACA | 1229 |
| 919 | GAUGAAAGUUACCAGUCUA | 906 | 919 | GAUGAAAGUUACCAGUCUA | 906 | 937 | UAGACUGGUAACUUUCAUC | 1230 |
| 937 | AUUAUGUACAUAGUUGUCG | 907 | 937 | AUUAUGUACAUAGUUGUCG | 907 | 955 | CGACAACUAUGUACAUAAU | 1231 |
| 955 | GUUGUAGGGUAUAGGAUUU | 908 | 955 | GUUGUAGGGUAUAGGAUUU | 908 | 973 | AAAUCCUAUACCCUACAAC | 1232 |
| 973 | UAUGAUGUGGUUCUGAGUC | 909 | 973 | UAUGAUGUGGUUCUGAGUC | 909 | 991 | GACUCAGAACCACAUCAUA | 1233 |
| 991 | CCGUCUCAUGGAAUUGAAC | 910 | 991 | CCGUCUCAUGGAAUUGAAC | 910 | 1009 | GUUCAAUUCCAUGAGACGG | 1234 |
| 1009 | CUAUCUGUUGGAGAAAAGC | 911 | 1009 | CUAUCUGUUGGAGAAAAGC | 911 | 1027 | GCUUUUCUCCAACAGAUAG | 1235 |
| 1027 | CUUGUCUUAAAUUGUACAG | 912 | 1027 | CUUGUCUUAAAUUGUACAG | 912 | 1045 | CUGUACAAUUUAAGACAAG | 1236 |
| 1045 | GCAAGAACUGAACUAAAUG | 913 | 1045 | GCAAGAACUGAACUAAAUG | 913 | 1063 | CAUUUAGUUCAGUUCUUGC | 1237 |
| 1063 | GUGGGGAUUGACUUCAACU | 914 | 1063 | GUGGGGAUUGACUUCAACU | 914 | 1081 | AGUUGAAGUCAAUCCCCAC | 1238 |
| 1081 | UGGGAAUACCCUUCUUCGA | 915 | 1081 | UGGGAAUACCCUUCUUCGA | 915 | 1099 | UCGAAGAAGGGUAUUCCCA | 1239 |
| 1099 | AAGCAUCAGCAUAAGAAAC | 916 | 1099 | AAGCAUCAGCAUAAGAAAC | 916 | 1117 | GUUUCUUAUGCUGAUGCUU | 1240 |
| 1117 | CUUGUAAACCGAGACCUAA | 917 | 1117 | CUUGUAAACCGAGACCUAA | 917 | 1135 | UUAGGUCUCGGUUUACAAG | 1241 |
| 1135 | AAAACCCAGUCUGGGAGUG | 918 | 1135 | AAAACCCAGUCUGGGAGUG | 918 | 1153 | CACUCCCAGACUGGGUUUU | 1242 |
| 1153 | GAGAUGAAGAAAUUUUUGA | 919 | 1153 | GAGAUGAAGAAAUUUUUGA | 919 | 1171 | UCAAAAAUUUCUUCAUCUC | 1243 |
| 1171 | AGCACCUUAACUAUAGAUG | 920 | 1171 | AGCACCUUAACUAUAGAUG | 920 | 1189 | CAUCUAUAGUUAAGGUGCU | 1244 |
| 1189 | GGUGUAACCCGGAGUGACC | 921 | 1189 | GGUGUAACCCGGAGUGACC | 921 | 1207 | GGUCACUCCGGGUUACACC | 1245 |
| 1207 | CAAGGAUUGUACACCUGUG | 922 | 1207 | CAAGGAUUGUACACCUGUG | 922 | 1225 | CACAGGUGUACAAUCCUUG | 1246 |
| 1225 | GCAGCAUCCAGUGGGCUGA | 923 | 1225 | GCAGCAUCCAGUGGGCUGA | 923 | 1243 | UCAGCCCACUGGAUGCUGC | 1247 |
| 1243 | AUGACCAAGAAGAACAGCA | 924 | 1243 | AUGACCAAGAAGAACAGCA | 924 | 1261 | UGCUGUUCUUCUUGGUCAU | 1248 |
| 1261 | ACAUUUGUCAGGGUCCAUG | 925 | 1261 | ACAUUUGUCAGGGUCCAUG | 925 | 1279 | CAUGGACCCUGACAAAUGU | 1249 |
| 1279 | GAAAAACCUUUUGUUGCUU | 926 | 1279 | GAAAAACCUUUUGUUGCUU | 926 | 1297 | AAGCAACAAAAGGUUUUUC | 1250 |
| 1297 | UUUGGAAGUGGCAUGGAAU | 927 | 1297 | UUUGGAAGUGGCAUGGAAU | 927 | 1315 | AUUCCAUGCCACUUCCAAA | 1251 |
| 1315 | UCUCUGGUGGAAGCCACGG | 928 | 1315 | UCUCUGGUGGAAGCCACGG | 928 | 1333 | CCGUGGCUUCCACCAGAGA | 1252 |
| 1333 | GUGGGGGAGCGUGUCAGAA | 929 | 1333 | GUGGGGGAGCGUGUCAGAA | 929 | 1351 | UUCUGACACGCUCCCCCAC | 1253 |
| 1351 | AUCCCUGCGAAGUACCUUG | 930 | 1351 | AUCCCUGCGAAGUACCUUG | 930 | 1369 | CAAGGUACUUCGCAGGGAU | 1254 |
| 1369 | GGUUACCCACCCCCAGAAA | 931 | 1369 | GGUUACCCACCCCCAGAAA | 931 | 1387 | UUUCUGGGGGUGGGUAACC | 1255 |
| 1387 | AUAAAAUGGUAUAAAAAUG | 932 | 1387 | AUAAAAUGGUAUAAAAAUG | 932 | 1405 | CAUUUUUAUACCAUUUUAU | 1256 |
| 1405 | GGAAUACCCCUUGAGUCCA | 933 | 1405 | GGAAUACCCCUUGAGUCCA | 933 | 1423 | UGGACUCAAGGGGUAUUCC | 1257 |
| 1423 | AAUCACACAAUUAAAGCGG | 934 | 1423 | AAUCACACAAUUAAAGCGG | 934 | 1441 | CCGCUUUAAUUGUGUGAUU | 1258 |
| 1441 | GGGCAUGUACUGACGAUUA | 935 | 1441 | GGGCAUGUACUGACGAUUA | 935 | 1459 | UAAUCGUCAGUACAUGCCC | 1259 |
| 1459 | AUGGAAGUGAGUGAAAGAG | 936 | 1459 | AUGGAAGUGAGUGAAAGAG | 936 | 1477 | CUCUUUCACUCACUUCCAU | 1260 |
| 1477 | GACACAGGAAAUUACACUG | 937 | 1477 | GACACAGGAAAUUACACUG | 937 | 1495 | CAGUGUAAUUUCCUGUGUC | 1261 |
| 1495 | GUCAUCCUUACCAAUCCCA | 938 | 1495 | GUCAUCCUUACCAAUCCCA | 938 | 1513 | UGGGAUUGGUAAGGAUGAC | 1262 |
| 1513 | AUUUCAAAGGAGAAGCAGA | 939 | 1513 | AUUUCAAAGGAGAAGCAGA | 939 | 1531 | UCUGCUUCUCCUUUGAAAU | 1263 |
| 1531 | AGCCAUGUGGUCUCUCUGG | 940 | 1531 | AGCCAUGUGGUCUCUCUGG | 940 | 1549 | CCAGAGAGACCACAUGGCU | 1264 |
| 1549 | GUUGUGUAUGUCCCACCCC | 941 | 1549 | GUUGUGUAUGUCCCACCCC | 941 | 1567 | GGGGUGGGACAUACACAAC | 1265 |
| 1567 | CAGAUUGGUGAGAAAUCUC | 942 | 1567 | CAGAUUGGUGAGAAAUCUC | 942 | 1585 | GAGAUUUCUCACCAAUCUG | 1266 |
| 1585 | CUAAUCUCUCCUGUGGAUU | 943 | 1585 | CUAAUCUCUCCUGUGGAUU | 943 | 1603 | AAUCCACAGGAGAGAUUAG | 1267 |
| 1603 | UCCUACCAGUACGGCACCA | 944 | 1603 | UCCUACCAGUACGGCACCA | 944 | 1621 | UGGUGCCGUACUGGUAGGA | 1268 |
| 1621 | ACUCAAACGCUGACAUGUA | 945 | 1621 | ACUCAAACGCUGACAUGUA | 945 | 1639 | UACAUGUCAGCGUUUGAGU | 1269 |
| 1639 | ACGGUCUAUGCCAUUCCUC | 946 | 1639 | ACGGUCUAUGCCAUUCCUC | 946 | 1657 | GAGGAAUGGCAUAGACCGU | 1270 |
| 1657 | CCCCCGCAUCACAUCCACU | 947 | 1657 | CCCCCGCAUCACAUCCACU | 947 | 1675 | AGUGGAUGUGAUGCGGGGG | 1271 |
| 1675 | UGGUAUUGGCAGUUGGAGG | 948 | 1675 | UGGUAUUGGCAGUUGGAGG | 948 | 1693 | CCUCCAACUGCCAAUACCA | 1272 |
| 1693 | GAAGAGUGCGCCAACGAGC | 949 | 1693 | GAAGAGUGCGCCAACGAGC | 949 | 1711 | GCUCGUUGGCGCACUCUUC | 1273 |
| 1711 | CCCAGCCAAGCUGUCUCAG | 950 | 1711 | CCCAGCCAAGCUGUCUCAG | 950 | 1729 | CUGAGACAGCUUGGCUGGG | 1274 |
| 1729 | GUGACAAACCCAUACCCUU | 951 | 1729 | GUGACAAACCCAUACCCUU | 951 | 1747 | AAGGGUAUGGGUUUGUCAC | 1275 |
| 1747 | UGUGAAGAAUGGAGAAGUG | 952 | 1747 | UGUGAAGAAUGGAGAAGUG | 952 | 1765 | CACUUCUCCAUUCUUCACA | 1276 |
| 1765 | GUGGAGGACUUCCAGGGAG | 953 | 1765 | GUGGAGGACUUCCAGGGAG | 953 | 1783 | CUCCCUGGAAGUCCUCCAC | 1277 |
| 1783 | GGAAAUAAAAUUGAAGUUA | 954 | 1783 | GGAAAUAAAAUUGAAGUUA | 954 | 1801 | UAACUUCAAUUUUAUUUCC | 1278 |
| 1801 | AAUAAAAAUCAAUUUGCUC | 955 | 1801 | AAUAAAAAUCAAUUUGCUC | 955 | 1819 | GAGCAAAUUGAUUUUUAUU | 1279 |
| 1819 | CUAAUUGAAGGAAAAAACA | 956 | 1819 | CUAAUUGAAGGAAAAAACA | 956 | 1837 | UGUUUUUUCCUUCAAUUAG | 1280 |
| 1837 | AAAACUGUAAGUACCCUUG | 957 | 1837 | AAAACUGUAAGUACCCUUG | 957 | 1855 | CAAGGGUACUUACAGUUUU | 1281 |
| 1855 | GUUAUCCAAGCGGCAAAUG | 958 | 1855 | GUUAUCCAAGCGGCAAAUG | 958 | 1873 | CAUUUGCCGCUUGGAUAAC | 1282 |
| 1873 | GUGUCAGCUUUGUACAAAU | 959 | 1873 | GUGUCAGCUUUGUACAAAU | 959 | 1891 | AUUUGUACAAAGCUGACAC | 1283 |
| 1891 | UGUGAAGCGGUCAACAAAG | 960 | 1891 | UGUGAAGCGGUCAACAAAG | 960 | 1909 | CUUUGUUGACCGCUUCACA | 1284 |
| 1909 | GUCGGGAGAGGAGAGAGGG | 961 | 1909 | GUCGGGAGAGGAGAGAGGG | 961 | 1927 | CCCUCUCUCCUCUCCCGAC | 1285 |
| 1927 | GUGAUCUCCUUCCACGUGA | 962 | 1927 | GUGAUCUCCUUCCACGUGA | 962 | 1945 | UCACGUGGAAGGAGAUCAC | 1286 |
| 1945 | ACCAGGGGUCCUGAAAUUA | 963 | 1945 | ACCAGGGGUCCUGAAAUUA | 963 | 1963 | UAAUUUCAGGACCCCUGGU | 1287 |
| 1963 | ACUUUGCAACCUGACAUGC | 964 | 1963 | ACUUUGCAACCUGACAUGC | 964 | 1981 | GCAUGUCAGGUUGCAAAGU | 1288 |
| 1981 | CAGCCCACUGAGCAGGAGA | 965 | 1981 | CAGCCCACUGAGCAGGAGA | 965 | 1999 | UCUCCUGCUCAGUGGGCUG | 1289 |
| 1999 | AGCGUGUCUUUGUGGUGCA | 966 | 1999 | AGCGUGUCUUUGUGGUGCA | 966 | 2017 | UGCACCACAAAGACACGCU | 1290 |
| 2017 | ACUGCAGACAGAUCUACGU | 967 | 2017 | ACUGCAGACAGAUCUACGU | 967 | 2035 | ACGUAGAUCUGUCUGCAGU | 1291 |
| 2035 | UUUGAGAACCUCACAUGGU | 968 | 2035 | UUUGAGAACCUCACAUGGU | 968 | 2053 | ACCAUGUGAGGUUCUCAAA | 1292 |
| 2053 | UACAAGCUUGGCCCACAGC | 969 | 2053 | UACAAGCUUGGCCCACAGC | 969 | 2071 | GCUGUGGGCCAAGCUUGUA | 1293 |
| 2071 | CCUCUGCCAAUCCAUGUGG | 970 | 2071 | CCUCUGCCAAUCCAUGUGG | 970 | 2089 | CCACAUGGAUUGGCAGAGG | 1294 |
| 2089 | GGAGAGUUGCCCACACCUG | 971 | 2089 | GGAGAGUUGCCCACACCUG | 971 | 2107 | CAGGUGUGGGCAACUCUCC | 1295 |
| 2107 | GUUUGCAAGAACUUGGAUA | 972 | 2107 | GUUUGCAAGAACUUGGAUA | 972 | 2125 | UAUCCAAGUUCUUGCAAAC | 1296 |
| 2125 | ACUCUUUGGAAAUUGAAUG | 973 | 2125 | ACUCUUUGGAAAUUGAAUG | 973 | 2143 | CAUUCAAUUUCCAAAGAGU | 1297 |
| 2143 | GCCACCAUGUUCUCUAAUA | 974 | 2143 | GCCACCAUGUUCUCUAAUA | 974 | 2161 | UAUUAGAGAACAUGGUGGC | 1298 |
| 2161 | AGCACAAAUGACAUUUUGA | 975 | 2161 | AGCACAAAUGACAUUUUGA | 975 | 2179 | UCAAAAUGUCAUUUGUGCU | 1299 |
| 2179 | AUCAUGGAGCUUAAGAAUG | 976 | 2179 | AUCAUGGAGCUUAAGAAUG | 976 | 2197 | CAUUCUUAAGCUCCAUGAU | 1300 |
| 2197 | GCAUCCUUGCAGGACCAAG | 977 | 2197 | GCAUCCUUGCAGGACCAAG | 977 | 2215 | CUUGGUCCUGCAAGGAUGC | 1301 |
| 2215 | GGAGACUAUGUCUGCCUUG | 978 | 2215 | GGAGACUAUGUCUGCCUUG | 978 | 2233 | CAAGGCAGACAUAGUCUCC | 1302 |
| 2233 | GCUCAAGACAGGAAGACCA | 979 | 2233 | GCUCAAGACAGGAAGACCA | 979 | 2251 | UGGUCUUCCUGUCUUGAGC | 1303 |
| 2251 | AAGAAAAGACAUUGCGUGG | 980 | 2251 | AAGAAAAGACAUUGCGUGG | 980 | 2269 | CCACGCAAUGUCUUUUCUU | 1304 |
| 2269 | GUCAGGCAGCUCACAGUCC | 981 | 2269 | GUCAGGCAGCUCACAGUCC | 981 | 2287 | GGACUGUGAGCUGCCUGAC | 1305 |
| 2287 | CUAGAGCGUGUGGCACCCA | 982 | 2287 | CUAGAGCGUGUGGCACCCA | 982 | 2305 | UGGGUGCCACACGCUCUAG | 1306 |
| 2305 | ACGAUCACAGGAAACCUGG | 983 | 2305 | ACGAUCACAGGAAACCUGG | 983 | 2323 | CCAGGUUUCCUGUGAUCGU | 1307 |
| 2323 | GAGAAUCAGACGACAAGUA | 984 | 2323 | GAGAAUCAGACGACAAGUA | 984 | 2341 | UACUUGUCGUCUGAUUCUC | 1308 |
| 2341 | AUUGGGGAAAGCAUCGAAG | 985 | 2341 | AUUGGGGAAAGCAUCGAAG | 985 | 2359 | CUUCGAUGCUUUCCCCAAU | 1309 |
| 2359 | GUCUCAUGCACGGCAUCUG | 986 | 2359 | GUCUCAUGCACGGCAUCUG | 986 | 2377 | CAGAUGCCGUGCAUGAGAC | 1310 |
| 2377 | GGGAAUCCCCCUCCACAGA | 987 | 2377 | GGGAAUCCCCCUCCACAGA | 987 | 2395 | UCUGUGGAGGGGGAUUCCC | 1311 |
| 2395 | AUCAUGUGGUUUAAAGAUA | 988 | 2395 | AUCAUGUGGUUUAAAGAUA | 988 | 2413 | UAUCUUUAAACCACAUGAU | 1312 |
| 2413 | AAUGAGACCCUUGUAGAAG | 989 | 2413 | AAUGAGACCCUUGUAGAAG | 989 | 2431 | CUUCUACAAGGGUCUCAUU | 1313 |
| 2431 | GACUCAGGCAUUGUAUUGA | 990 | 2431 | GACUCAGGCAUUGUAUUGA | 990 | 2449 | UCAAUACAAUGCCUGAGUC | 1314 |
| 2449 | AAGGAUGGGAACCGGAACC | 991 | 2449 | AAGGAUGGGAACCGGAACC | 991 | 2467 | GGUUCCGGUUCCCAUCCUU | 1315 |
| 2467 | CUCACUAUCCGCAGAGUGA | 992 | 2467 | CUCACUAUCCGCAGAGUGA | 992 | 2485 | UCACUCUGCGGAUAGUGAG | 1316 |
| 2485 | AGGAAGGAGGACGAAGGCC | 993 | 2485 | AGGAAGGAGGACGAAGGCC | 993 | 2503 | GGCCUUCGUCCUCCUUCCU | 1317 |
| 2503 | CUCUACACCUGCCAGGCAU | 994 | 2503 | CUCUACACCUGCCAGGCAU | 994 | 2521 | AUGCCUGGCAGGUGUAGAG | 1318 |
| 2521 | UGCAGUGUUCUUGGCUGUG | 995 | 2521 | UGCAGUGUUCUUGGCUGUG | 995 | 2539 | CACAGCCAAGAACACUGCA | 1319 |
| 2539 | GCAAAAGUGGAGGCAUUUU | 996 | 2539 | GCAAAAGUGGAGGCAUUUU | 996 | 2557 | AAAAUGCCUCCACUUUUGC | 1320 |
| 2557 | UUCAUAAUAGAAGGUGCCC | 997 | 2557 | UUCAUAAUAGAAGGUGCCC | 997 | 2575 | GGGCACCUUCUAUUAUGAA | 1321 |
| 2575 | CAGGAAAAGACGAACUUGG | 998 | 2575 | CAGGAAAAGACGAACUUGG | 998 | 2593 | CCAAGUUCGUCUUUUCCUG | 1322 |
| 2593 | GAAAUCAUUAUUCUAGUAG | 999 | 2593 | GAAAUCAUUAUUCUAGUAG | 999 | 2611 | CUACUAGAAUAAUGAUUUC | 1323 |
| 2611 | GGCACGGCGGUGAUUGCCA | 1000 | 2611 | GGCACGGCGGUGAUUGCCA | 1000 | 2629 | UGGCAAUCACCGCCGUGCC | 1324 |
| 2629 | AUGUUCUUCUGGCUACUUC | 1001 | 2629 | AUGUUCUUCUGGCUACUUC | 1001 | 2647 | GAAGUAGCCAGAAGAACAU | 1325 |
| 2647 | CUUGUCAUCAUCCUACGGA | 1002 | 2647 | CUUGUCAUCAUCCUACGGA | 1002 | 2665 | UCCGUAGGAUGAUGACAAG | 1326 |
| 2665 | ACCGUUAAGCGGGCCAAUG | 1003 | 2665 | ACCGUUAAGCGGGCCAAUG | 1003 | 2683 | CAUUGGCCCGCUUAACGGU | 1327 |
| 2683 | GGAGGGGAACUGAAGACAG | 1004 | 2683 | GGAGGGGAACUGAAGACAG | 1004 | 2701 | CUGUCUUCAGUUCCCCUCC | 1328 |
| 2701 | GGCUACUUGUCCAUCGUCA | 1005 | 2701 | GGCUACUUGUCCAUCGUCA | 1005 | 2719 | UGACGAUGGACAAGUAGCC | 1329 |
| 2719 | AUGGAUCCAGAUGAACUCC | 1006 | 2719 | AUGGAUCCAGAUGAACUCC | 1006 | 2737 | GGAGUUCAUCUGGAUCCAU | 1330 |
| 2737 | CCAUUGGAUGAACAUUGUG | 1007 | 2737 | CCAUUGGAUGAACAUUGUG | 1007 | 2755 | CACAAUGUUCAUCCAAUGG | 1331 |
| 2755 | GAACGACUGCCUUAUGAUG | 1008 | 2755 | GAACGACUGCCUUAUGAUG | 1008 | 2773 | CAUCAUAAGGCAGUCGUUC | 1332 |
| 2773 | GCCAGCAAAUGGGAAUUCC | 1009 | 2773 | GCCAGCAAAUGGGAAUUCC | 1009 | 2791 | GGAAUUCCCAUUUGCUGGC | 1333 |
| 2791 | CCCAGAGACCGGCUGAAGC | 1010 | 2791 | CCCAGAGACCGGCUGAAGC | 1010 | 2809 | GCUUCAGCCGGUCUCUGGG | 1334 |
| 2809 | CUAGGUAAGCCUCUUGGCC | 1011 | 2809 | CUAGGUAAGCCUCUUGGCC | 1011 | 2827 | GGCCAAGAGGCUUACCUAG | 1335 |
| 2827 | CGUGGUGCCUUUGGCCAAG | 1012 | 2827 | CGUGGUGCCUUUGGCCAAG | 1012 | 2845 | CUUGGCCAAAGGCACCACG | 1336 |
| 2845 | GUGAUUGAAGCAGAUGCCU | 1013 | 2845 | GUGAUUGAAGCAGAUGCCU | 1013 | 2863 | AGGCAUCUGCUUCAAUCAC | 1337 |
| 2863 | UUUGGAAUUGACAAGACAG | 1014 | 2863 | UUUGGAAUUGACAAGACAG | 1014 | 2881 | CUGUCUUGUCAAUUCCAAA | 1338 |
| 2881 | GCAACUUGCAGGACAGUAG | 1015 | 2881 | GCAACUUGCAGGACAGUAG | 1015 | 2899 | CUACUGUCCUGCAAGUUGC | 1339 |
| 2899 | GCAGUCAAAAUGUUGAAAG | 1016 | 2899 | GCAGUCAAAAUGUUGAAAG | 1016 | 2917 | CUUUCAACAUUUUGACUGC | 1340 |
| 2917 | GAAGGAGCAACACACAGUG | 1017 | 2917 | GAAGGAGCAACACACAGUG | 1017 | 2935 | CACUGUGUGUUGCUCCUUC | 1341 |
| 2935 | GAGCAUCGAGCUCUCAUGU | 1018 | 2935 | GAGCAUCGAGCUCUCAUGU | 1018 | 2953 | ACAUGAGAGCUCGAUGCUC | 1342 |
| 2953 | UCUGAACUCAAGAUCCUCA | 1019 | 2953 | UCUGAACUCAAGAUCCUCA | 1019 | 2971 | UGAGGAUCUUGAGUUCAGA | 1343 |
| 2971 | AUUCAUAUUGGUCACCAUC | 1020 | 2971 | AUUCAUAUUGGUCACCAUC | 1020 | 2989 | GAUGGUGACCAAUAUGAAU | 1344 |
| 2989 | CUCAAUGUGGUCAACCUUC | 1021 | 2989 | CUCAAUGUGGUCAACCUUC | 1021 | 3007 | GAAGGUUGACCACAUUGAG | 1345 |
| 3007 | CUAGGUGCCUGUACCAAGC | 1022 | 3007 | CUAGGUGCCUGUACCAAGC | 1022 | 3025 | GCUUGGUACAGGCACCUAG | 1346 |
| 3025 | CCAGGAGGGCCACUCAUGG | 1023 | 3025 | CCAGGAGGGCCACUCAUGG | 1023 | 3043 | CCAUGAGUGGCCCUCCUGG | 1347 |
| 3043 | GUGAUUGUGGAAUUCUGCA | 1024 | 3043 | GUGAUUGUGGAAUUCUGCA | 1024 | 3061 | UGCAGAAUUCCACAAUCAC | 1348 |
| 3061 | AAAUUUGGAAACCUGUCCA | 1025 | 3061 | AAAUUUGGAAACCUGUCCA | 1025 | 3079 | UGGACAGGUUUCCAAAUUU | 1349 |
| 3079 | ACUUACCUGAGGAGCAAGA | 1026 | 3079 | ACUUACCUGAGGAGCAAGA | 1026 | 3097 | UCUUGCUCCUCAGGUAAGU | 1350 |
| 3097 | AGAAAUGAAUUUGUCCCCU | 1027 | 3097 | AGAAAUGAAUUUGUCCCCU | 1027 | 3115 | AGGGGACAAAUUCAUUUCU | 1351 |
| 3115 | UACAAGACCAAAGGGGCAC | 1028 | 3115 | UACAAGACCAAAGGGGCAC | 1028 | 3133 | GUGCCCCUUUGGUCUUGUA | 1352 |
| 3133 | CGAUUCCGUCAAGGGAAAG | 1029 | 3133 | CGAUUCCGUCAAGGGAAAG | 1029 | 3151 | CUUUCCCUUGACGGAAUCG | 1353 |
| 3151 | GACUACGUUGGAGCAAUCC | 1030 | 3151 | GACUACGUUGGAGCAAUCC | 1030 | 3169 | GGAUUGCUCCAACGUAGUC | 1354 |
| 3169 | CCUGUGGAUCUGAAACGGC | 1031 | 3169 | CCUGUGGAUCUGAAACGGC | 1031 | 3187 | GCCGUUUCAGAUCCACAGG | 1355 |
| 3187 | CGCUUGGACAGCAUCACCA | 1032 | 3187 | CGCUUGGACAGCAUCACCA | 1032 | 3205 | UGGUGAUGCUGUCCAAGCG | 1356 |
| 3205 | AGUAGCCAGAGCUCAGCCA | 1033 | 3205 | AGUAGCCAGAGCUCAGCCA | 1033 | 3223 | UGGCUGAGCUCUGGCUACU | 1357 |
| 3223 | AGCUCUGGAUUUGUGGAGG | 1034 | 3223 | AGCUCUGGAUUUGUGGAGG | 1034 | 3241 | CCUCCACAAAUCCAGAGCU | 1358 |
| 3241 | GAGAAGUCCCUCAGUGAUG | 1035 | 3241 | GAGAAGUCCCUCAGUGAUG | 1035 | 3259 | CAUCACUGAGGGACUUCUC | 1359 |
| 3259 | GUAGAAGAAGAGGAAGCUC | 1036 | 3259 | GUAGAAGAAGAGGAAGCUC | 1036 | 3277 | GAGCUUCCUCUUCUUCUAC | 1360 |
| 3277 | CCUGAAGAUCUGUAUAAGG | 1037 | 3277 | CCUGAAGAUCUGUAUAAGG | 1037 | 3295 | CCUUAUACAGAUCUUCAGG | 1361 |
| 3295 | GACUUCCUGACCUUGGAGC | 1038 | 3295 | GACUUCCUGACCUUGGAGC | 1038 | 3313 | GCUCCAAGGUCAGGAAGUC | 1362 |
| 3313 | CAUCUCAUCUGUUACAGCU | 1039 | 3313 | CAUCUCAUCUGUUACAGCU | 1039 | 3331 | AGCUGUAACAGAUGAGAUG | 1363 |
| 3331 | UUCCAAGUGGCUAAGGGCA | 1040 | 3331 | UUCCAAGUGGCUAAGGGCA | 1040 | 3349 | UGCCCUUAGCCACUUGGAA | 1364 |
| 3349 | AUGGAGUUCUUGGCAUCGC | 1041 | 3349 | AUGGAGUUCUUGGCAUCGC | 1041 | 3367 | GCGAUGCCAAGAACUCCAU | 1365 |
| 3367 | CGAAAGUGUAUCCACAGGG | 1042 | 3367 | CGAAAGUGUAUCCACAGGG | 1042 | 3385 | CCCUGUGGAUACACUUUCG | 1366 |
| 3385 | GACCUGGCGGCACGAAAUA | 1043 | 3385 | GACCUGGCGGCACGAAAUA | 1043 | 3403 | UAUUUCGUGCCGCCAGGUC | 1367 |
| 3403 | AUCCUCUUAUCGGAGAAGA | 1044 | 3403 | AUCCUCUUAUCGGAGAAGA | 1044 | 3421 | UCUUCUCCGAUAAGAGGAU | 1368 |
| 3421 | AACGUGGUUAAAAUCUGUG | 1045 | 3421 | AACGUGGUUAAAAUCUGUG | 1045 | 3439 | CACAGAUUUUAACCACGUU | 1369 |
| 3439 | GACUUUGGCUUGGCCCGGG | 1046 | 3439 | GACUUUGGCUUGGCCCGGG | 1046 | 3457 | CCCGGGCCAAGCCAAAGUC | 1370 |
| 3457 | GAUAUUUAUAAAGAUCCAG | 1047 | 3457 | GAUAUUUAUAAAGAUCCAG | 1047 | 3475 | CUGGAUCUUUAUAAAUAUC | 1371 |
| 3475 | GAUUAUGUCAGAAAAGGAG | 1048 | 3475 | GAUUAUGUCAGAAAAGGAG | 1048 | 3493 | CUCCUUUUCUGACAUAAUC | 1372 |
| 3493 | GAUGCUCGCCUCCCUUUGA | 1049 | 3493 | GAUGCUCGCCUCCCUUUGA | 1049 | 3511 | UCAAAGGGAGGCGAGCAUC | 1373 |
| 3511 | AAAUGGAUGGCCCCAGAAA | 1050 | 3511 | AAAUGGAUGGCCCCAGAAA | 1050 | 3529 | UUUCUGGGGCCAUCCAUUU | 1374 |
| 3529 | ACAAUUUUUGACAGAGUGU | 1051 | 3529 | ACAAUUUUUGACAGAGUGU | 1051 | 3547 | ACACUCUGUCAAAAAUUGU | 1375 |
| 3547 | UACACAAUCCAGAGUGACG | 1052 | 3547 | UACACAAUCCAGAGUGACG | 1052 | 3565 | CGUCACUCUGGAUUGUGUA | 1376 |
| 3565 | GUCUGGUCUUUUGGUGUUU | 1053 | 3565 | GUCUGGUCUUUUGGUGUUU | 1053 | 3583 | AAACACCAAAAGACCAGAC | 1377 |
| 3583 | UUGCUGUGGGAAAUAUUUU | 1054 | 3583 | UUGCUGUGGGAAAUAUUUU | 1054 | 3601 | AAAAUAUUUCCCACAGCAA | 1378 |
| 3601 | UCCUUAGGUGCUUCUCCAU | 1055 | 3601 | UCCUUAGGUGCUUCUCCAU | 1055 | 3619 | AUGGAGAAGCACCUAAGGA | 1379 |
| 3619 | UAUCCUGGGGUAAAGAUUG | 1056 | 3619 | UAUCCUGGGGUAAAGAUUG | 1056 | 3637 | CAAUCUUUACCCCAGGAUA | 1380 |
| 3637 | GAUGAAGAAUUUUGUAGGC | 1057 | 3637 | GAUGAAGAAUUUUGUAGGC | 1057 | 3655 | GCCUACAAAAUUCUUCAUC | 1381 |
| 3655 | CGAUUGAAAGAAGGAACUA | 1058 | 3655 | CGAUUGAAAGAAGGAACUA | 1058 | 3673 | UAGUUCCUUCUUUCAAUCG | 1382 |
| 3673 | AGAAUGAGGGCCCCUGAUU | 1059 | 3673 | AGAAUGAGGGCCCCUGAUU | 1059 | 3691 | AAUCAGGGGCCCUCAUUCU | 1383 |
| 3691 | UAUACUACACCAGAAAUGU | 1060 | 3691 | UAUACUACACCAGAAAUGU | 1060 | 3709 | ACAUUUCUGGUGUAGUAUA | 1384 |
| 3709 | UACCAGACCAUGCUGGACU | 1061 | 3709 | UACCAGACCAUGCUGGACU | 1061 | 3727 | AGUCCAGCAUGGUCUGGUA | 1385 |
| 3727 | UGCUGGCACGGGGAGCCCA | 1062 | 3727 | UGCUGGCACGGGGAGCCCA | 1062 | 3745 | UGGGCUCCCCGUGCCAGCA | 1386 |
| 3745 | AGUCAGAGACCCACGUUUU | 1063 | 3745 | AGUCAGAGACCCACGUUUU | 1063 | 3763 | AAAACGUGGGUCUCUGACU | 1387 |
| 3763 | UCAGAGUUGGUGGAACAUU | 1064 | 3763 | UCAGAGUUGGUGGAACAUU | 1064 | 3781 | AAUGUUCCACCAACUCUGA | 1388 |
| 3781 | UUGGGAAAUCUCUUGCAAG | 1065 | 3781 | UUGGGAAAUCUCUUGCAAG | 1065 | 3799 | CUUGCAAGAGAUUUCCCAA | 1389 |
| 3799 | GCUAAUGCUCAGCAGGAUG | 1066 | 3799 | GCUAAUGCUCAGCAGGAUG | 1066 | 3817 | CAUCCUGCUGAGCAUUAGC | 1390 |
| 3817 | GGCAAAGACUACAUUGUUC | 1067 | 3817 | GGCAAAGACUACAUUGUUC | 1067 | 3835 | GAACAAUGUAGUCUUUGCC | 1391 |
| 3835 | CUUCCGAUAUCAGAGACUU | 1068 | 3835 | CUUCCGAUAUCAGAGACUU | 1068 | 3853 | AAGUCUCUGAUAUCGGAAG | 1392 |
| 3853 | UUGAGCAUGGAAGAGGAUU | 1069 | 3853 | UUGAGCAUGGAAGAGGAUU | 1069 | 3871 | AAUCCUCUUCCAUGCUCAA | 1393 |
| 3871 | UCUGGACUCUCUCUGCCUA | 1070 | 3871 | UCUGGACUCUCUCUGCCUA | 1070 | 3889 | UAGGCAGAGAGAGUCCAGA | 1394 |
| 3889 | ACCUCACCUGUUUCCUGUA | 1071 | 3889 | ACCUCACCUGUUUCCUGUA | 1071 | 3907 | UACAGGAAACAGGUGAGGU | 1395 |
| 3907 | AUGGAGGAGGAGGAAGUAU | 1072 | 3907 | AUGGAGGAGGAGGAAGUAU | 1072 | 3925 | AUACUUCCUCCUCCUCCAU | 1396 |
| 3925 | UGUGACCCCAAAUUCCAUU | 1073 | 3925 | UGUGACCCCAAAUUCCAUU | 1073 | 3943 | AAUGGAAUUUGGGGUCACA | 1397 |
| 3943 | UAUGACAACACAGCAGGAA | 1074 | 3943 | UAUGACAACACAGCAGGAA | 1074 | 3961 | UUCCUGCUGUGUUGUCAUA | 1398 |
| 3961 | AUCAGUCAGUAUCUGCAGA | 1075 | 3961 | AUCAGUCAGUAUCUGCAGA | 1075 | 3979 | UCUGCAGAUACUGACUGAU | 1399 |
| 3979 | AACAGUAAGCGAAAGAGCC | 1076 | 3979 | AACAGUAAGCGAAAGAGCC | 1076 | 3997 | GGCUCUUUCGCUUACUGUU | 1400 |
| 3997 | CGGCCUGUGAGUGUAAAAA | 1077 | 3997 | CGGCCUGUGAGUGUAAAAA | 1077 | 4015 | UUUUUACACUCACAGGCCG | 1401 |
| 4015 | ACAUUUGAAGAUAUCCCGU | 1078 | 4015 | ACAUUUGAAGAUAUCCCGU | 1078 | 4033 | ACGGGAUAUCUUCAAAUGU | 1402 |
| 4033 | UUAGAAGAACCAGAAGUAA | 1079 | 4033 | UUAGAAGAACCAGAAGUAA | 1079 | 4051 | UUACUUCUGGUUCUUCUAA | 1403 |
| 4051 | AAAGUAAUCCCAGAUGACA | 1080 | 4051 | AAAGUAAUCCCAGAUGACA | 1080 | 4069 | UGUCAUCUGGGAUUACUUU | 1404 |
| 4069 | AACCAGACGGACAGUGGUA | 1081 | 4069 | AACCAGACGGACAGUGGUA | 1081 | 4087 | UACCACUGUCCGUCUGGUU | 1405 |
| 4087 | AUGGUUCUUGCCUCAGAAG | 1082 | 4087 | AUGGUUCUUGCCUCAGAAG | 1082 | 4105 | CUUCUGAGGCAAGAACCAU | 1406 |
| 4105 | GAGCUGAAAACUUUGGAAG | 1083 | 4105 | GAGCUGAAAACUUUGGAAG | 1083 | 4123 | CUUCCAAAGUUUUCAGCUC | 1407 |
| 4123 | GACAGAACCAAAUUAUCUC | 1084 | 4123 | GACAGAACCAAAUUAUCUC | 1084 | 4141 | GAGAUAAUUUGGUUCUGUC | 1408 |
| 4141 | CCAUCUUUUGGUGGAAUGG | 1085 | 4141 | CCAUCUUUUGGUGGAAUGG | 1085 | 4159 | CCAUUCCACCAAAAGAUGG | 1409 |
| 4159 | GUGCCCAGCAAAAGCAGGG | 1086 | 4159 | GUGCCCAGCAAAAGCAGGG | 1086 | 4177 | CCCUGCUUUUGCUGGGCAC | 1410 |
| 4177 | GAGUCUGUGGCAUCUGAAG | 1087 | 4177 | GAGUCUGUGGCAUCUGAAG | 1087 | 4195 | CUUCAGAUGCCACAGACUC | 1411 |
| 4195 | GGCUCAAACCAGACAAGCG | 1088 | 4195 | GGCUCAAACCAGACAAGCG | 1088 | 4213 | CGCUUGUCUGGUUUGAGCC | 1412 |
| 4213 | GGCUACCAGUCCGGAUAUC | 1089 | 4213 | GGCUACCAGUCCGGAUAUC | 1089 | 4231 | GAUAUCCGGACUGGUAGCC | 1413 |
| 4231 | CACUCCGAUGACACAGACA | 1090 | 4231 | CACUCCGAUGACACAGACA | 1090 | 4249 | UGUCUGUGUCAUCGGAGUG | 1414 |
| 4249 | ACCACCGUGUACUCCAGUG | 1091 | 4249 | ACCACCGUGUACUCCAGUG | 1091 | 4267 | CACUGGAGUACACGGUGGU | 1415 |
| 4267 | GAGGAAGCAGAACUUUUAA | 1092 | 4267 | GAGGAAGCAGAACUUUUAA | 1092 | 4285 | UUAAAAGUUCUGCUUCCUC | 1416 |
| 4285 | AAGCUGAUAGAGAUUGGAG | 1093 | 4285 | AAGCUGAUAGAGAUUGGAG | 1093 | 4303 | CUCCAAUCUCUAUCAGCUU | 1417 |
| 4303 | GUGCAAACCGGUAGCACAG | 1094 | 4303 | GUGCAAACCGGUAGCACAG | 1094 | 4321 | CUGUGCUACCGGUUUGCAC | 1418 |
| 4321 | GCCCAGAUUCUCCAGCCUG | 1095 | 4321 | GCCCAGAUUCUCCAGCCUG | 1095 | 4339 | CAGGCUGGAGAAUCUGGGC | 1419 |
| 4339 | GACUCGGGGACCACACUGA | 1096 | 4339 | GACUCGGGGACCACACUGA | 1096 | 4357 | UCAGUGUGGUCCCCGAGUC | 1420 |
| 4357 | AGCUCUCCUCCUGUUUAAA | 1097 | 4357 | AGCUCUCCUCCUGUUUAAA | 1097 | 4375 | UUUAAACAGGAGGAGAGCU | 1421 |
| 4375 | AAGGAAGCAUCCACACCCC | 1098 | 4375 | AAGGAAGCAUCCACACCCC | 1098 | 4393 | GGGGUGUGGAUGCUUCCUU | 1422 |
| 4393 | CAACUCCCGGACAUCACAU | 1099 | 4393 | CAACUCCCGGACAUCACAU | 1099 | 4411 | AUGUGAUGUCCGGGAGUUG | 1423 |
| 4411 | UGAGAGGUCUGCUCAGAUU | 1100 | 4411 | UGAGAGGUCUGCUCAGAUU | 1100 | 4429 | AAUCUGAGCAGACCUCUCA | 1424 |
| 4429 | UUUGAAGUGUUGUUCUUUC | 1101 | 4429 | UUUGAAGUGUUGUUCUUUC | 1101 | 4447 | GAAAGAACAACACUUCAAA | 1425 |
| 4447 | CCACCAGCAGGAAGUAGCC | 1102 | 4447 | CCACCAGCAGGAAGUAGCC | 1102 | 4465 | GGCUACUUCCUGCUGGUGG | 1426 |
| 4465 | CGCAUUUGAUUUUCAUUUC | 1103 | 4465 | CGCAUUUGAUUUUCAUUUC | 1103 | 4483 | GAAAUGAAAAUCAAAUGCG | 1427 |
| 4483 | CGACAACAGAAAAAGGACC | 1104 | 4483 | CGACAACAGAAAAAGGACC | 1104 | 4501 | GGUCCUUUUUCUGUUGUCG | 1428 |
| 4501 | CUCGGACUGCAGGGAGCCA | 1105 | 4501 | CUCGGACUGCAGGGAGCCA | 1105 | 4519 | UGGCUCCCUGCAGUCCGAG | 1429 |
| 4519 | AGUCUUCUAGGCAUAUCCU | 1106 | 4519 | AGUCUUCUAGGCAUAUCCU | 1106 | 4537 | AGGAUAUGCCUAGAAGACU | 1430 |
| 4537 | UGGAAGAGGCUUGUGACCC | 1107 | 4537 | UGGAAGAGGCUUGUGACCC | 1107 | 4555 | GGGUCACAAGCCUCUUCCA | 1431 |
| 4555 | CAAGAAUGUGUCUGUGUCU | 1108 | 4555 | CAAGAAUGUGUCUGUGUCU | 1108 | 4573 | AGACACAGACACAUUCUUG | 1432 |
| 4573 | UUCUCCCAGUGUUGACCUG | 1109 | 4573 | UUCUCCCAGUGUUGACCUG | 1109 | 4591 | CAGGUCAACACUGGGAGAA | 1433 |
| 4591 | GAUCCUCUUUUUUCAUUCA | 1110 | 4591 | GAUCCUCUUUUUUCAUUCA | 1110 | 4609 | UGAAUGAAAAAAGAGGAUC | 1434 |
| 4609 | AUUUAAAAAGCAUUAUCAU | 1111 | 4609 | AUUUAAAAAGCAUUAUCAU | 1111 | 4627 | AUGAUAAUGCUUUUUAAAU | 1435 |
| 4627 | UGCCCCUGCUGCGGGUCUC | 1112 | 4627 | UGCCCCUGCUGCGGGUCUC | 1112 | 4645 | GAGACCCGCAGCAGGGGCA | 1436 |
| 4645 | CACCAUGGGUUUAGAACAA | 1113 | 4645 | CACCAUGGGUUUAGAACAA | 1113 | 4663 | UUGUUCUAAACCCAUGGUG | 1437 |
| 4663 | AAGAGCUUCAAGCAAUGGC | 1114 | 4663 | AAGAGCUUCAAGCAAUGGC | 1114 | 4681 | GCCAUUGCUUGAAGCUCUU | 1438 |
| 4681 | CCCCAUCCUCAAAGAAGUA | 1115 | 4681 | CCCCAUCCUCAAAGAAGUA | 1115 | 4699 | UACUUCUUUGAGGAUGGGG | 1439 |
| 4699 | AGCAGUACCUGGGGAGCUG | 1116 | 4699 | AGCAGUACCUGGGGAGCUG | 1116 | 4717 | CAGCUCCCCAGGUACUGCU | 1440 |
| 4717 | GACACUUCUGUAAAACUAG | 1117 | 4717 | GACACUUCUGUAAAACUAG | 1117 | 4735 | CUAGUUUUACAGAAGUGUC | 1441 |
| 4735 | GAAGAUAAACCAGGCAACG | 1118 | 4735 | GAAGAUAAACCAGGCAACG | 1118 | 4753 | CGUUGCCUGGUUUAUCUUC | 1442 |
| 4753 | GUAAGUGUUCGAGGUGUUG | 1119 | 4753 | GUAAGUGUUCGAGGUGUUG | 1119 | 4771 | CAACACCUCGAACACUUAC | 1443 |
| 4771 | GAAGAUGGGAAGGAUUUGC | 1120 | 4771 | GAAGAUGGGAAGGAUUUGC | 1120 | 4789 | GCAAAUCCUUCCCAUCUUC | 1444 |
| 4789 | CAGGGCUGAGUCUAUCCAA | 1121 | 4789 | CAGGGCUGAGUCUAUCCAA | 1121 | 4807 | UUGGAUAGACUCAGCCCUG | 1445 |
| 4807 | AGAGGCUUUGUUUAGGACG | 1122 | 4807 | AGAGGCUUUGUUUAGGACG | 1122 | 4825 | CGUCCUAAACAAAGCCUCU | 1446 |
| 4825 | GUGGGUCCCAAGCCAAGCC | 1123 | 4825 | GUGGGUCCCAAGCCAAGCC | 1123 | 4843 | GGCUUGGCUUGGGACCCAC | 1447 |
| 4843 | CUUAAGUGUGGAAUUCGGA | 1124 | 4843 | CUUAAGUGUGGAAUUCGGA | 1124 | 4861 | UCCGAAUUCCACACUUAAG | 1448 |
| 4861 | AUUGAUAGAAAGGAAGACU | 1125 | 4861 | AUUGAUAGAAAGGAAGACU | 1125 | 4879 | AGUCUUCCUUUCUAUCAAU | 1449 |
| 4879 | UAACGUUACCUUGCUUUGG | 1126 | 4879 | UAACGUUACCUUGCUUUGG | 1126 | 4897 | CCAAAGCAAGGUAACGUUA | 1450 |
| 4897 | GAGAGUACUGGAGCCUGCA | 1127 | 4897 | GAGAGUACUGGAGCCUGCA | 1127 | 4915 | UGCAGGCUCCAGUACUCUC | 1451 |
| 4915 | AAAUGCAUUGUGUUUGCUC | 1128 | 4915 | AAAUGCAUUGUGUUUGCUC | 1128 | 4933 | GAGCAAACACAAUGCAUUU | 1452 |
| 4933 | CUGGUGGAGGUGGGCAUGG | 1129 | 4933 | CUGGUGGAGGUGGGCAUGG | 1129 | 4951 | CCAUGCCCACCUCCACCAG | 1453 |
| 4951 | GGGUCUGUUCUGAAAUGUA | 1130 | 4951 | GGGUCUGUUCUGAAAUGUA | 1130 | 4969 | UACAUUUCAGAACAGACCC | 1454 |
| 4969 | AAAGGGUUCAGACGGGGUU | 1131 | 4969 | AAAGGGUUCAGACGGGGUU | 1131 | 4987 | AACCCCGUCUGAACCCUUU | 1455 |
| 4987 | UUCUGGUUUUAGAAGGUUG | 1132 | 4987 | UUCUGGUUUUAGAAGGUUG | 1132 | 5005 | CAACCUUCUAAAACCAGAA | 1456 |
| 5005 | GCGUGUUCUUCGAGUUGGG | 1133 | 5005 | GCGUGUUCUUCGAGUUGGG | 1133 | 5023 | CCCAACUCGAAGAACACGC | 1457 |
| 5023 | GCUAAAGUAGAGUUCGUUG | 1134 | 5023 | GCUAAAGUAGAGUUCGUUG | 1134 | 5041 | CAACGAACUCUACUUUAGC | 1458 |
| 5041 | GUGCUGUUUCUGACUCCUA | 1135 | 5041 | GUGCUGUUUCUGACUCCUA | 1135 | 5059 | UAGGAGUCAGAAACAGCAC | 1459 |
| 5059 | AAUGAGAGUUCCUUCCAGA | 1136 | 5059 | AAUGAGAGUUCCUUCCAGA | 1136 | 5077 | UCUGGAAGGAACUCUCAUU | 1460 |
| 5077 | ACCGUUAGCUGUCUCCUUG | 1137 | 5077 | ACCGUUAGCUGUCUCCUUG | 1137 | 5095 | CAAGGAGACAGCUAACGGU | 1461 |
| 5095 | GCCAAGCCCCAGGAAGAAA | 1138 | 5095 | GCCAAGCCCCAGGAAGAAA | 1138 | 5113 | UUUCUUCCUGGGGCUUGGC | 1462 |
| 5113 | AAUGAUGCAGCUCUGGCUC | 1139 | 5113 | AAUGAUGCAGCUCUGGCUC | 1139 | 5131 | GAGCCAGAGCUGCAUCAUU | 1463 |
| 5131 | CCUUGUCUCCCAGGCUGAU | 1140 | 5131 | CCUUGUCUCCCAGGCUGAU | 1140 | 5149 | AUCAGCCUGGGAGACAAGG | 1464 |
| 5149 | UCCUUUAUUCAGAAUACCA | 1141 | 5149 | UCCUUUAUUCAGAAUACCA | 1141 | 5167 | UGGUAUUCUGAAUAAAGGA | 1465 |
| 5167 | ACAAAGAAAGGACAUUCAG | 1142 | 5167 | ACAAAGAAAGGACAUUCAG | 1142 | 5185 | CUGAAUGUCCUUUCUUUGU | 1466 |
| 5185 | GCUCAAGGCUCCCUGCCGU | 1143 | 5185 | GCUCAAGGCUCCCUGCCGU | 1143 | 5203 | ACGGCAGGGAGCCUUGAGC | 1467 |
| 5203 | UGUUGAAGAGUUCUGACUG | 1144 | 5203 | UGUUGAAGAGUUCUGACUG | 1144 | 5221 | CAGUCAGAACUCUUCAACA | 1468 |
| 5221 | GCACAAACCAGCUUCUGGU | 1145 | 5221 | GCACAAACCAGCUUCUGGU | 1145 | 5239 | ACCAGAAGCUGGUUUGUGC | 1469 |
| 5239 | UUUCUUCUGGAAUGAAUAC | 1146 | 5239 | UUUCUUCUGGkAUGAAUAC | 1146 | 5257 | GUAUUCAUUCCAGAAGAAA | 1470 |
| 5257 | CCCUCAUAUCUGUCCUGAU | 1147 | 5257 | CCCUCAUAUCUGUCCUGAU | 1147 | 5275 | AUCAGGACAGAUAUGAGGG | 1471 |
| 5275 | UGUGAUAUGUCUGAGACUG | 1148 | 5275 | UGUGAUAUGUCUGAGACUG | 1148 | 5293 | CAGUCUCAGACAUAUCACA | 1472 |
| 5293 | GAAUGCGGGAGGUUCAAUG | 1149 | 5293 | GAAUGCGGGAGGUUCAAUG | 1149 | 5311 | CAUUGAACCUCCCGCAUUC | 1473 |
| 5311 | GUGAAGCUGUGUGUGGUGU | 1150 | 5311 | GUGAAGCUGUGUGUGGUGU | 1150 | 5329 | ACACCACACACAGCUUCAC | 1474 |
| 5329 | UCAAAGUUUCAGGAAGGAU | 1151 | 5329 | UCAAAGUUUCAGGAAGGAU | 1151 | 5347 | AUCCUUCCUGAAACUUUGA | 1475 |
| 5347 | UUUUACCCUUUUGUUCUUC | 1152 | 5347 | UUUUACCCUUUUGUUCUUC | 1152 | 5365 | GAAGAACAAAAGGGUAAAA | 1476 |
| 5365 | CCCCCUGUCCCCAACCCAC | 1153 | 5365 | CCCCCUGUCCCCAACCCAC | 1153 | 5383 | GUGGGUUGGGGACAGGGGG | 1477 |
| 5383 | CUCUCACCCCGCAACCCAU | 1154 | 5383 | CUCUCACCCCGCAACCCAU | 1154 | 5401 | AUGGGUUGCGGGGUGAGAG | 1478 |
| 5401 | UCAGUAUUUUAGUUAUUUG | 1155 | 5401 | UCAGUAUUUUAGUUAUUUG | 1155 | 5419 | CAAAUAACUAAAAUACUGA | 1479 |
| 5419 | GGCCUCUACUCCAGUAAAC | 1156 | 5419 | GGCCUCUACUCCAGUAAAC | 1156 | 5437 | GUUUACUGGAGUAGAGGCC | 1480 |
| 5437 | CCUGAUUGGGUUUGUUCAC | 1157 | 5437 | CCUGAUUGGGUUUGUUCAC | 1157 | 5455 | GUGAACAAACCCAAUCAGG | 1481 |
| 5455 | CUCUCUGAAUGAUUAUUAG | 1158 | 5455 | CUCUCUGAAUGAUUAUUAG | 1158 | 5473 | CUAAUAAUCAUUCAGAGAG | 1482 |
| 5473 | GCCAGACUUCAAAAUUAUU | 1159 | 5473 | GCCAGACUUCAAAAUUAUU | 1159 | 5491 | AAUAAUUUUGAAGUCUGGC | 1483 |
| 5491 | UUUAUAGCCCAAAUUAUAA | 1160 | 5491 | UUUAUAGCCCAAAUUAUAA | 1160 | 5509 | UUAUAAUUUGGGCUAUAAA | 1484 |
| 5509 | ACAUCUAUUGUAUUAUUUA | 1161 | 5509 | ACAUCUAUUGUAUUAUUUA | 1161 | 5527 | UAAAUAAUACAAUAGAUGU | 1485 |
| 5527 | AGACUUUUAACAUAUAGAG | 1162 | 5527 | AGACUUUUAACAUAUAGAG | 1162 | 5545 | CUCUAUAUGUUAAAAGUCU | 1486 |
| 5545 | GCUAUUUCUACUGAUUUUU | 1163 | 5545 | GCUAUUUCUACUGAUUUUU | 1163 | 5563 | AAAAAUCAGUAGAAAUAGC | 1487 |
| 5563 | UGCCCUUGUUCUGUCCUUU | 1164 | 5563 | UGCCCUUGUUCUGUCCUUU | 1164 | 5581 | AAAGGACAGAACAAGGGCA | 1488 |
| 5581 | UUUUUCAAAAAAGAAAAUG | 1165 | 5581 | UUUUUCAAAAAAGAAAAUG | 1165 | 5599 | CAUUUUCUUUUUUGAAAAA | 1489 |
| 5599 | GUGUUUUUUGUUUGGUACC | 1166 | 5599 | GUGUUUUUUGUUUGGUACC | 1166 | 5617 | GGUACCAAACAAAAAACAC | 1490 |
| 5617 | CAUAGUGUGAAAUGCUGGG | 1167 | 5617 | CAUAGUGUGAAAUGCUGGG | 1167 | 5635 | CCCAGCAUUUCACACUAUG | 1491 |
| 5635 | GAACAAUGACUAUAAGACA | 1168 | 5635 | GAACAAUGACUAUAAGACA | 1168 | 5653 | UGUCUUAUAGUCAUUGUUC | 1492 |
| 5653 | AUGCUAUGGCACAUAUAUU | 1169 | 5653 | AUGCUAUGGCACAUAUAUU | 1169 | 5671 | AAUAUAUGUGCCAUAGCAU | 1493 |
| 5671 | UUAUAGUCUGUUUAUGUAG | 1170 | 5671 | UUAUAGUCUGUUUAUGUAG | 1170 | 5689 | CUACAUAAACAGACUAUAA | 1494 |
| 5689 | GAAACAAAUGUAAUAUAUU | 1171 | 5689 | GAAACAAAUGUAAUAUAUU | 1171 | 5707 | AAUAUAUUACAUUUGUUUC | 1495 |
| 5707 | UAAAGCCUUAUAUAUAAUG | 1172 | 5707 | UAAAGCCUUAUAUAUAAUG | 1172 | 5725 | CAUUAUAUAUAAGGCUUUA | 1496 |
| 5725 | GAACUUUGUACUAUUCACA | 1173 | 5725 | GAACUUUGUACUAUUCACA | 1173 | 5743 | UGUGAAUAGUACAAAGUUC | 1497 |
| 5743 | AUUUUGUAUCAGUAUUAUG | 1174 | 5743 | AUUUUGUAUCAGUAUUAUG | 1174 | 5761 | CAUAAUACUGAUACAAAAU | 1498 |
| 5761 | GUAGCAUAACAAAGGUCAU | 1175 | 5761 | GUAGCAUAACAAAGGUCAU | 1175 | 5779 | AUGACCUUUGUUAUGCUAC | 1499 |
| 5779 | UAAUGCUUUCAGCAAUUGA | 1176 | 5779 | UAAUGCUUUCAGCAAUUGA | 1176 | 5797 | UCAAUUGCUGAAAGCAUUA | 1500 |
| 5797 | AUGUCAUUUUAUUAAAGAA | 1177 | 5797 | AUGUCAUUUUAUUAAAGAA | 1177 | 5815 | UUCUUUAAUAAAAUGACAU | 1501 |
| 5812 | AGAACAUUGAAAAACUUGA | 1178 | 5812 | AGAACAUUGAAAAACUUGA | 1178 | 5830 | UCAAGUUUUUCAAUGUUCU | 1502 |

VEGFR3/FLT4 NM_002020.1

| | | |
|---|---|---|
| Seq | Seq | Seq |

| | | | | | | | | |
|---|---|---|---|---|---|---|---|---|
| Pos | Target Sequence | ID | UPos | Upper seq | ID | LPos | Lower seq | ID |

| | | | | | | | | |
|---|---|---|---|---|---|---|---|---|
| 1 | ACCCACGCGCAGCGGCCGG | 1503 | 1 | ACCCACGCGCAGCGGCCGG | 1503 | 19 | CCGGCCGCUGCGCGUGGGU | 1750 |
| 19 | GAGAUGCAGCGGGGCGCCG | 1504 | 19 | GAGAUGCAGCGGGGCGCCG | 1504 | 37 | CGGCGCCCCGCUGCAUCUC | 1751 |
| 37 | GCGCUGUGCCUGCGACUGU | 1505 | 37 | GCGCUGUGCCUGCGACUGU | 1505 | 55 | ACAGUCGCAGGCACAGCGC | 1752 |
| 55 | UGGCUCUGCCUGGGACUCC | 1506 | 55 | UGGCUCUGCCUGGGACUCC | 1506 | 73 | GGAGUCCCAGGCAGAGCCA | 1753 |
| 73 | CUGGACGGCCUGGUGAGUG | 1507 | 73 | CUGGACGGCCUGGUGAGUG | 1507 | 91 | CACUCACCAGGCCGUCCAG | 1754 |
| 91 | GACUACUCCAUGACCCCCC | 1508 | 91 | GACUACUCCAUGACCCCCC | 1508 | 109 | GGGGGGUCAUGGAGUAGUC | 1755 |
| 109 | CCGACCUUGAACAUCACGG | 1509 | 109 | CCGACCUUGAACAUCACGG | 1509 | 127 | CCGUGAUGUUCAAGGUCGG | 1756 |
| 127 | GAGGAGUCACACGUCAUCG | 1510 | 127 | GAGGAGUCACACGUCAUCG | 1510 | 145 | CGAUGACGUGUGACUCCUC | 1757 |
| 145 | GACACCGGUGACAGCCUGU | 1511 | 145 | GACACCGGUGACAGCCUGU | 1511 | 163 | ACAGGCUGUCACCGGUGUC | 1758 |
| 163 | UCCAUCUCCUGCAGGGGAC | 1512 | 163 | UCCAUCUCCUGCAGGGGAC | 1512 | 181 | GUCCCCUGCAGGAGAUGGA | 1759 |
| 181 | CAGCACCCCCUCGAGUGGG | 1513 | 181 | CAGCACCCCCUCGAGUGGG | 1513 | 199 | CCCACUCGAGGGGGUGCUG | 1760 |
| 199 | GCUUGGCCAGGAGCUCAGG | 1514 | 199 | GCUUGGCCAGGAGCUCAGG | 1514 | 217 | CCUGAGCUCCUGGCCAAGC | 1761 |
| 217 | GAGGCGCCAGCCACCGGAG | 1515 | 217 | GAGGCGCCAGCCACCGGAG | 1515 | 235 | CUCCGGUGGCUGGCGCCUC | 1762 |
| 235 | GACAAGGACAGCGAGGACA | 1516 | 235 | GACAAGGACAGCGAGGACA | 1516 | 253 | UGUCCUCGCUGUCCUUGUC | 1763 |
| 253 | ACGGGGGUGGUGCGAGACU | 1517 | 253 | ACGGGGGUGGUGCGAGACU | 1517 | 271 | AGUCUCGCACCACCCCCGU | 1764 |
| 271 | UGCGAGGGCACAGACGCCA | 1518 | 271 | UGCGAGGGCACAGACGCCA | 1518 | 289 | UGGCGUCUGUGCCCUCGCA | 1765 |
| 289 | AGGCCCUACUGCAAGGUGU | 1519 | 289 | AGGCCCUACUGCAAGGUGU | 1519 | 307 | ACACCUUGCAGUAGGGCCU | 1766 |
| 307 | UUGCUGCUGCACGAGGUAC | 1520 | 307 | UUGCUGCUGCACGAGGUAC | 1520 | 325 | GUACCUCGUGCAGCAGCAA | 1767 |
| 325 | CAUGCCAACGACACAGGCA | 1521 | 325 | CAUGCCAACGACACAGGCA | 1521 | 343 | UGCCUGUGUCGUUGGCAUG | 1768 |
| 343 | AGCUACGUCUGCUACUACA | 1522 | 343 | AGCUACGUCUGCUACUACA | 1522 | 361 | UGUAGUAGCAGACGUAGCU | 1769 |
| 361 | AAGUACAUCAAGGCACGCA | 1523 | 361 | AAGUACAUCAAGGCACGCA | 1523 | 379 | UGCGUGCCUUGAUGUACUU | 1770 |
| 379 | AUCGAGGGCACCACGGCCG | 1524 | 379 | AUCGAGGGCACCACGGCCG | 1524 | 397 | CGGCCGUGGUGCCCUCGAU | 1771 |
| 397 | GCCAGCUCCUACGUGUUCG | 1525 | 397 | GCCAGCUCCUACGUGUUCG | 1525 | 415 | CGAACACGUAGGAGCUGGC | 1772 |
| 415 | GUGAGAGACUUUGAGCAGC | 1526 | 415 | GUGAGAGACUUUGAGCAGC | 1526 | 433 | GCUGCUCAAAGUCUCUCAC | 1773 |
| 433 | CCAUUCAUCAACAAGCCUG | 1527 | 433 | CCAUUCAUCAACAAGCCUG | 1527 | 451 | CAGGCUUGUUGAUGAAUGG | 1774 |
| 451 | GACACGCUCUUGGUCAACA | 1528 | 451 | GACACGCUCUUGGUCAACA | 1528 | 469 | UGUUGACCAAGAGCGUGUC | 1775 |
| 469 | AGGAAGGACGCCAUGUGGG | 1529 | 469 | AGGAAGGACGCCAUGUGGG | 1529 | 487 | CCCACAUGGCGUCCUUCCU | 1776 |
| 487 | GUGCCCUGUCUGGUGUCCA | 1530 | 487 | GUGCCCUGUCUGGUGUCCA | 1530 | 505 | UGGACACCAGACAGGGCAC | 1777 |
| 505 | AUCCCCGGCCUCAAUGUCA | 1531 | 505 | AUCCCCGGCCUCAAUGUCA | 1531 | 523 | UGACAUUGAGGCCGGGGAU | 1778 |
| 523 | ACGCUGCGCUCGCAAAGCU | 1532 | 523 | ACGCUGCGCUCGCAAAGCU | 1532 | 541 | AGCUUUGCGAGCGCAGCGU | 1779 |
| 541 | UCGGUGCUGUGGCCAGACG | 1533 | 541 | UCGGUGCUGUGGCCAGACG | 1533 | 559 | CGUCUGGCCACAGCACCGA | 1780 |
| 559 | GGGCAGGAGGUGGUGUGGG | 1534 | 559 | GGGCAGGAGGUGGUGUGGG | 1534 | 577 | CCCACACCACCUCCUGCCC | 1781 |
| 577 | GAUGACCGGCGGGGCAUGC | 1535 | 577 | GAUGACCGGCGGGGCAUGC | 1535 | 595 | GCAUGCCCCGCCGGUCAUC | 1782 |
| 595 | CUCGUGUCCACGCCACUGC | 1536 | 595 | CUCGUGUCCACGCCACUGC | 1536 | 613 | GCAGUGGCGUGGACACGAG | 1783 |
| 613 | CUGCACGAUGCCCUGUACC | 1537 | 613 | CUGCACGAUGCCCUGUACC | 1537 | 631 | GGUACAGGGCAUCGUGCAG | 1784 |
| 631 | CUGCAGUGCGAGACCACCU | 1538 | 631 | CUGCAGUGCGAGACCACCU | 1538 | 649 | AGGUGGUCUCGCACUGCAG | 1785 |
| 649 | UGGGGAGACCAGGACUUCC | 1539 | 649 | UGGGGAGACCAGGACUUCC | 1539 | 667 | GGAAGUCCUGGUCUCCCCA | 1786 |
| 667 | CUUUCCAACCCCUUCCUGG | 1540 | 667 | CUUUCCAACCCCUUCCUGG | 1540 | 685 | CCAGGAAGGGGUUGGAAAG | 1787 |
| 685 | GUGCACAUCACAGGCAACG | 1541 | 685 | GUGCACAUCACAGGCAACG | 1541 | 703 | CGUUGCCUGUGAUGUGCAC | 1788 |
| 703 | GAGCUCUAUGACAUCCAGC | 1542 | 703 | GAGCUCUAUGACAUCCAGC | 1542 | 721 | GCUGGAUGUCAUAGAGCUC | 1789 |
| 721 | CUGUUGCCCAGGAAGUCGC | 1543 | 721 | CUGUUGCCCAGGAAGUCGC | 1543 | 739 | GCGACUUCCUGGGCAACAG | 1790 |
| 739 | CUGGAGCUGCUGGUAGGGG | 1544 | 739 | CUGGAGCUGCUGGUAGGGG | 1544 | 757 | CCCCUACCAGCAGCUCCAG | 1791 |
| 757 | GAGAAGCUGGUCCUCAACU | 1545 | 757 | GAGAAGCUGGUCCUCAACU | 1545 | 775 | AGUUGAGGACCAGCUUCUC | 1792 |
| 775 | UGCACCGUGUGGGCUGAGU | 1546 | 775 | UGCACCGUGUGGGCUGAGU | 1546 | 793 | ACUCAGCCCACACGGUGCA | 1793 |
| 793 | UUUAACUCAGGUGUCACCU | 1547 | 793 | UUUAACUCAGGUGUCACCU | 1547 | 811 | AGGUGACACCUGAGUUAAA | 1794 |
| 811 | UUUGACUGGGACUACCCAG | 1548 | 811 | UUUGACUGGGACUACCCAG | 1548 | 829 | CUGGGUAGUCCCAGUCAAA | 1795 |
| 829 | GGGAAGCAGGCAGAGCGGG | 1549 | 829 | GGGAAGCAGGCAGAGCGGG | 1549 | 847 | CCCGCUCUGCCUGCUUCCC | 1796 |
| 847 | GGUAAGUGGGUGCCCGAGC | 1550 | 847 | GGUAAGUGGGUGCCCGAGC | 1550 | 865 | GCUCGGGCACCCACUUACC | 1797 |
| 865 | CGACGCUCCCAACAGACCC | 1551 | 865 | CGACGCUCCCAACAGACCC | 1551 | 883 | GGGUCUGUUGGGAGCGUCG | 1798 |
| 883 | CACACAGAACUCUCCAGCA | 1552 | 883 | CACACAGAACUCUCCAGCA | 1552 | 901 | UGCUGGAGAGUUCUGUGUG | 1799 |
| 901 | AUCCUGACCAUCCACAACG | 1553 | 901 | AUCCUGACCAUCCACAACG | 1553 | 919 | CGUUGUGGAUGGUCAGGAU | 1800 |
| 919 | GUCAGCCAGCACGACCUGG | 1554 | 919 | GUCAGCCAGCACGACCUGG | 1554 | 937 | CCAGGUCGUGCUGGCUGAC | 1801 |
| 937 | GGCUCGUAUGUGUGCAAGG | 1555 | 937 | GGCUCGUAUGUGUGCAAGG | 1555 | 955 | CCUUGCACACAUACGAGCC | 1802 |
| 955 | GCCAACAACGGCAUCCAGC | 1556 | 955 | GCCAACAACGGCAUCCAGC | 1556 | 973 | GCUGGAUGCCGUUGUUGGC | 1803 |
| 973 | CGAUUUCGGGAGAGCACCG | 1557 | 973 | CGAUUUCGGGAGAGCACCG | 1557 | 991 | CGGUGCUCUCCCGAAAUCG | 1804 |
| 991 | GAGGUCAUUGUGCAUGAAA | 1558 | 991 | GAGGUCAUUGUGCAUGAAA | 1558 | 1009 | UUUCAUGCACAAUGACCUC | 1805 |
| 1009 | AAUCCCUUCAUCAGCGUCG | 1559 | 1009 | AAUCCCUUCAUCAGCGUCG | 1559 | 1027 | CGACGCUGAUGAAGGGAUU | 1806 |
| 1027 | GAGUGGCUCAAAGGACCCA | 1560 | 1027 | GAGUGGCUCAAAGGACCCA | 1560 | 1045 | UGGGUCCUUUGAGCCACUC | 1807 |
| 1045 | AUCCUGGAGGCCACGGCAG | 1561 | 1045 | AUCCUGGAGGCCACGGCAG | 1561 | 1063 | CUGCCGUGGCCUCCAGGAU | 1808 |
| 1063 | GGAGACGAGCUGGUGAAGC | 1562 | 1063 | GGAGACGAGCUGGUGAAGC | 1562 | 1081 | GCUUCACCAGCUCGUCUCC | 1809 |
| 1081 | CUGCCCGUGAAGCUGGCAG | 1563 | 1081 | CUGCCCGUGAAGCUGGCAG | 1563 | 1099 | CUGCCAGCUUCACGGGCAG | 1810 |
| 1099 | GCGUACCCCCCGCCCGAGU | 1564 | 1099 | GCGUACCCCCCGCCCGAGU | 1564 | 1117 | ACUCGGGCGGGGGGUACGC | 1811 |
| 1117 | UUCCAGUGGUACAAGGAUG | 1565 | 1117 | UUCCAGUGGUACAAGGAUG | 1565 | 1135 | CAUCCUUGUACCACUGGAA | 1812 |
| 1135 | GGAAAGGCACUGUCCGGGC | 1566 | 1135 | GGAAAGGCACUGUCCGGGC | 1566 | 1153 | GCCCGGACAGUGCCUUUCC | 1813 |
| 1153 | CGCCACAGUCCACAUGCCC | 1567 | 1153 | CGCCACAGUCCACAUGCCC | 1567 | 1171 | GGGCAUGUGGACUGUGGCG | 1814 |
| 1171 | CUGGUGCUCAAGGAGGUGA | 1568 | 1171 | CUGGUGCUCAAGGAGGUGA | 1568 | 1189 | UCACCUCCUUGAGCACCAG | 1815 |
| 1189 | ACAGAGGCCAGCACAGGCA | 1569 | 1189 | ACAGAGGCCAGCACAGGCA | 1569 | 1207 | UGCCUGUGCUGGCCUCUGU | 1816 |
| 1207 | ACCUACACCCUCGCCCUGU | 1570 | 1207 | ACCUACACCCUCGCCCUGU | 1570 | 1225 | ACAGGGCGAGGGUGUAGGU | 1817 |
| 1225 | UGGAACUCCGCUGCUGGCC | 1571 | 1225 | UGGAACUCCGCUGCUGGCC | 1571 | 1243 | GGCCAGCAGCGGAGUUCCA | 1818 |
| 1243 | CUGAGGCGCAACAUCAGCC | 1572 | 1243 | CUGAGGCGCAACAUCAGCC | 1572 | 1261 | GGCUGAUGUUGCGCCUCAG | 1819 |
| 1261 | CUGGAGCUGGUGGUGAAUG | 1573 | 1261 | CUGGAGCUGGUGGUGAAUG | 1573 | 1279 | CAUUCACCACCAGCUCCAG | 1820 |
| 1279 | GUGCCCCCCCAGAUACAUG | 1574 | 1279 | GUGCCCCCCCAGAUACAUG | 1574 | 1297 | CAUGUAUCUGGGGGGGCAC | 1821 |
| 1297 | GAGAAGGAGGCCUCCUCCC | 1575 | 1297 | GAGAAGGAGGCCUCCUCCC | 1575 | 1315 | GGGAGGAGGCCUCCUUCUC | 1822 |
| 1315 | CCCAGCAUCUACUCGCGUC | 1576 | 1315 | CCCAGCAUCUACUCGCGUC | 1576 | 1333 | GACGCGAGUAGAUGCUGGG | 1823 |
| 1333 | CACAGCCGCCAGGCCCUCA | 1577 | 1333 | CACAGCCGCCAGGCCCUCA | 1577 | 1351 | UGAGGGCCUGGCGGCUGUG | 1824 |
| 1351 | ACCUGCACGGCCUACGGGG | 1578 | 1351 | ACCUGCACGGCCUACGGGG | 1578 | 1369 | CCCCGUAGGCCGUGCAGGU | 1825 |
| 1369 | GUGCCCCUGCCUCUCAGCA | 1579 | 1369 | GUGCCCCUGCCUCUCAGCA | 1579 | 1387 | UGCUGAGAGGCAGGGGCAC | 1826 |
| 1387 | AUCCAGUGGCACUGGCGGC | 1580 | 1387 | AUCCAGUGGCACUGGCGGC | 1580 | 1405 | GCCGCCAGUGCCACUGGAU | 1827 |
| 1405 | CCCUGGACACCCUGCAAGA | 1581 | 1405 | CCCUGGACACCCUGCAAGA | 1581 | 1423 | UCUUGCAGGGUGUCCAGGG | 1828 |
| 1423 | AUGUUUGCCCAGCGUAGUC | 1582 | 1423 | AUGUUUGCCCAGCGUAGUC | 1582 | 1441 | GACUACGCUGGGCAAACAU | 1829 |
| 1441 | CUCCGGCGGCGGCAGCAGC | 1583 | 1441 | CUCCGGCGGCGGCAGCAGC | 1583 | 1459 | GCUGCUGCCGCCGCCGGAG | 1830 |
| 1459 | CAAGACCUCAUGCCACAGU | 1584 | 1459 | CAAGACCUCAUGCCACAGU | 1584 | 1477 | ACUGUGGCAUGAGGUCUUG | 1831 |
| 1477 | UGCCGUGACUGGAGGGCGG | 1585 | 1477 | UGCCGUGACUGGAGGGCGG | 1585 | 1495 | CCGCCCUCCAGUCACGGCA | 1832 |
| 1495 | GUGACCACGCAGGAUGCCG | 1586 | 1495 | GUGACCACGCAGGAUGCCG | 1586 | 1513 | CGGCAUCCUGCGUGGUCAC | 1833 |
| 1513 | GUGAACCCCAUCGAGAGCC | 1587 | 1513 | GUGAACCCCAUCGAGAGCC | 1587 | 1531 | GGCUCUCGAUGGGGUUCAC | 1834 |
| 1531 | CUGGACACCUGGACCGAGU | 1588 | 1531 | CUGGACACCUGGACCGAGU | 1588 | 1549 | ACUCGGUCCAGGUGUCCAG | 1835 |
| 1549 | UUUGUGGAGGGAAAGAAUA | 1589 | 1549 | UUUGUGGAGGGAAAGAAUA | 1589 | 1567 | UAUUCUUUCCCUCCACAAA | 1836 |
| 1567 | AAGACUGUGAGCAAGCUGG | 1590 | 1567 | AAGACUGUGAGCAAGCUGG | 1590 | 1585 | CCAGCUUGCUCACAGUCUU | 1837 |
| 1585 | GUGAUCCAGAAUGCCAACG | 1591 | 1585 | GUGAUCCAGAAUGCCAACG | 1591 | 1603 | CGUUGGCAUUCUGGAUCAC | 1838 |
| 1603 | GUGUCUGCCAUGUACAAGU | 1592 | 1603 | GUGUCUGCCAUGUACAAGU | 1592 | 1621 | ACUUGUACAUGGCAGACAC | 1839 |
| 1621 | UGUGUGGUCUCCAACAAGG | 1593 | 1621 | UGUGUGGUCUCCAACAAGG | 1593 | 1639 | CCUUGUUGGAGACCACACA | 1840 |
| 1639 | GUGGGCCAGGAUGAGCGGC | 1594 | 1639 | GUGGGCCAGGAUGAGCGGC | 1594 | 1657 | GCCGCUCAUCCUGGCCCAC | 1841 |
| 1657 | CUCAUCUACUUCUAUGUGA | 1595 | 1657 | CUCAUCUACUUCUAUGUGA | 1595 | 1675 | UCACAUAGAAGUAGAUGAG | 1842 |
| 1675 | ACCACCAUCCCCGACGGCU | 1596 | 1675 | ACCACCAUCCCCGACGGCU | 1596 | 1693 | AGCCGUCGGGGAUGGUGGU | 1843 |
| 1693 | UUCACCAUCGAAUCCAAGC | 1597 | 1693 | UUCACCAUCGAAUCCAAGC | 1597 | 1711 | GCUUGGAUUCGAUGGUGAA | 1844 |
| 1711 | CCAUCCGAGGAGCUACUAG | 1598 | 1711 | CCAUCCGAGGAGCUACUAG | 1598 | 1729 | CUAGUAGCUCCUCGGAUGG | 1845 |
| 1729 | GAGGGCCAGCCGGUGCUCC | 1599 | 1729 | GAGGGCCAGCCGGUGCUCC | 1599 | 1747 | GGAGCACCGGCUGGCCCUC | 1846 |
| 1747 | CUGAGCUGCCAAGCCGACA | 1600 | 1747 | CUGAGCUGCCAAGCCGACA | 1600 | 1765 | UGUCGGCUUGGCAGCUCAG | 1847 |
| 1765 | AGCUACAAGUACGAGCAUC | 1601 | 1765 | AGCUACAAGUACGAGCAUC | 1601 | 1783 | GAUGCUCGUACUUGUAGCU | 1848 |
| 1783 | CUGCGCUGGUACCGCCUCA | 1602 | 1783 | CUGCGCUGGUACCGCCUCA | 1602 | 1801 | UGAGGCGGUACCAGCGCAG | 1849 |
| 1801 | AACCUGUCCACGCUGCACG | 1603 | 1801 | AACCUGUCCACGCUGCACG | 1603 | 1819 | CGUGCAGCGUGGACAGGUU | 1850 |
| 1819 | GAUGCGCACGGGAACCCGC | 1604 | 1819 | GAUGCGCACGGGAACCCGC | 1604 | 1837 | GCGGGUUCCCGUGCGCAUC | 1851 |
| 1837 | CUUCUGCUCGACUGCAAGA | 1605 | 1837 | CUUCUGCUCGACUGCAAGA | 1605 | 1855 | UCUUGCAGUCGAGCAGAAG | 1852 |
| 1855 | AACGUGCAUCUGUUCGCCA | 1606 | 1855 | AACGUGCAUCUGUUCGCCA | 1606 | 1873 | UGGCGAACAGAUGCACGUU | 1853 |
| 1873 | ACCCCUCUGGCCGCCAGCC | 1607 | 1873 | ACCCCUCUGGCCGCCAGCC | 1607 | 1891 | GGCUGGCGGCCAGAGGGGU | 1854 |
| 1891 | CUGGAGGAGGUGGCACCUG | 1608 | 1891 | CUGGAGGAGGUGGCACCUG | 1608 | 1909 | CAGGUGCCACCUCCUCCAG | 1855 |
| 1909 | GGGGCGCGCCACGCCACGC | 1609 | 1909 | GGGGCGCGCCACGCCACGC | 1609 | 1927 | GCGUGGCGUGGCGCGCCCC | 1856 |
| 1927 | CUCAGCCUGAGUAUCCCCC | 1610 | 1927 | CUCAGCCUGAGUAUCCCCC | 1610 | 1945 | GGGGGAUACUCAGGCUGAG | 1857 |
| 1945 | CGCGUCGCGCCCGAGCACG | 1611 | 1945 | CGCGUCGCGCCCGAGCACG | 1611 | 1963 | CGUGCUCGGGCGCGACGCG | 1858 |
| 1963 | GAGGGCCACUAUGUGUGCG | 1612 | 1963 | GAGGGCCACUAUGUGUGCG | 1612 | 1981 | CGCACACAUAGUGGCCCUC | 1859 |
| 1981 | GAAGUGCAAGACCGGCGCA | 1613 | 1981 | GAAGUGCAAGACCGGCGCA | 1613 | 1999 | UGCGCCGGUCUUGCACUUC | 1860 |
| 1999 | AGCCAUGACAAGCACUGCC | 1614 | 1999 | AGCCAUGACAAGCACUGCC | 1614 | 2017 | GGCAGUGCUUGUCAUGGCU | 1861 |
| 2017 | CACAAGAAGUACCUGUCGG | 1615 | 2017 | CACAAGAAGUACCUGUCGG | 1615 | 2035 | CCGACAGGUACUUCUUGUG | 1862 |
| 2035 | GUGCAGGCCCUGGAAGCCC | 1616 | 2035 | GUGCAGGCCCUGGAAGCCC | 1616 | 2053 | GGGCUUCCAGGGCCUGCAC | 1863 |
| 2053 | CCUCGGCUCACGCAGAACU | 1617 | 2053 | CCUCGGCUCACGCAGAACU | 1617 | 2071 | AGUUCUGCGUGAGCCGAGG | 1864 |
| 2071 | UUGACCGACCUCCUGGUGA | 1618 | 2071 | UUGACCGACCUCCUGGUGA | 1618 | 2089 | UCACCAGGAGGUCGGUCAA | 1865 |
| 2089 | AACGUGAGCGACUCGCUGG | 1619 | 2089 | AACGUGAGCGACUCGCUGG | 1619 | 2107 | CCAGCGAGUCGCUCACGUU | 1866 |
| 2107 | GAGAUGCAGUGCUUGGUGG | 1620 | 2107 | GAGAUGCAGUGCUUGGUGG | 1620 | 2125 | CCACCAAGCACUGCAUCUC | 1867 |
| 2125 | GCCGGAGCGCACGCGCCCA | 1621 | 2125 | GCCGGAGCGCACGCGCCCA | 1621 | 2143 | UGGGCGCGUGCGCUCCGGC | 1868 |
| 2143 | AGCAUCGUGUGGUACAAAG | 1622 | 2143 | AGCAUCGUGUGGUACAAAG | 1622 | 2161 | CUUUGUACCACACGAUGCU | 1869 |
| 2161 | GACGAGAGGCUGCUGGAGG | 1623 | 2161 | GACGAGAGGCUGCUGGAGG | 1623 | 2179 | CCUCCAGCAGCCUCUCGUC | 1870 |
| 2179 | GAAAAGUCUGGAGUCGACU | 1624 | 2179 | GAAAAGUCUGGAGUCGACU | 1624 | 2197 | AGUCGACUCCAGACUUUUC | 1871 |
| 2197 | UUGGCGGACUCCAACCAGA | 1625 | 2197 | UUGGCGGACUCCAACCAGA | 1625 | 2215 | UCUGGUUGGAGUCCGCCAA | 1872 |
| 2215 | AAGCUGAGCAUCCAGCGCG | 1626 | 2215 | AAGCUGAGCAUCCAGCGCG | 1626 | 2233 | CGCGCUGGAUGCUCAGCUU | 1873 |
| 2233 | GUGCGCGAGGAGGAUGCGG | 1627 | 2233 | GUGCGCGAGGAGGAUGCGG | 1627 | 2251 | CCGCAUCCUCCUCGCGCAC | 1874 |
| 2251 | GGACCGUAUCUGUGCAGCG | 1628 | 2251 | GGACCGUAUCUGUGCAGCG | 1628 | 2269 | CGCUGCACAGAUACGGUCC | 1875 |
| 2269 | GUGUGCAGACCCAAGGGCU | 1629 | 2269 | GUGUGCAGACCCAAGGGCU | 1629 | 2287 | AGCCCUUGGGUCUGCACAC | 1876 |
| 2287 | UGCGUCAACUCCUCCGCCA | 1630 | 2287 | UGCGUCAACUCCUCCGCCA | 1630 | 2305 | UGGCGGAGGAGUUGACGCA | 1877 |
| 2305 | AGCGUGGCCGUGGAAGGCU | 1631 | 2305 | AGCGUGGCCGUGGAAGGCU | 1631 | 2323 | AGCCUUCCACGGCCACGCU | 1878 |
| 2323 | UCCGAGGAUAAGGGCAGCA | 1632 | 2323 | UCCGAGGAUAAGGGCAGCA | 1632 | 2341 | UGCUGCCCUUAUCCUCGGA | 1879 |
| 2341 | AUGGAGAUCGUGAUCCUUG | 1633 | 2341 | AUGGAGAUCGUGAUCCUUG | 1633 | 2359 | CAAGGAUCACGAUCUCCAU | 1880 |
| 2359 | GUCGGUACCGGCGUCAUCG | 1634 | 2359 | GUCGGUACCGGCGUCAUCG | 1634 | 2377 | CGAUGACGCCGGUACCGAC | 1881 |
| 2377 | GCUGUCUUCUUCUGGGUCC | 1635 | 2377 | GCUGUCUUCUUCUGGGUCC | 1635 | 2395 | GGACCCAGAAGAAGACAGC | 1882 |
| 2395 | CUCCUCCUCCUCAUCUUCU | 1636 | 2395 | CUCCUCCUCCUCAUCUUCU | 1636 | 2413 | AGAAGAUGAGGAGGAGGAG | 1883 |
| 2413 | UGUAACAUGAGGAGGCCGG | 1637 | 2413 | UGUAACAUGAGGAGGCCGG | 1637 | 2431 | CCGGCCUCCUCAUGUUACA | 1884 |
| 2431 | GCCCACGCAGACAUCAAGA | 1638 | 2431 | GCCCACGCAGACAUCAAGA | 1638 | 2449 | UCUUGAUGUCUGCGUGGGC | 1885 |
| 2449 | ACGGGCUACCUGUCCAUCA | 1639 | 2449 | ACGGGCUACCUGUCCAUCA | 1639 | 2467 | UGAUGGACAGGUAGCCCGU | 1886 |
| 2467 | AUCAUGGACCCCGGGGAGG | 1640 | 2467 | AUCAUGGACCCCGGGGAGG | 1640 | 2485 | CCUCCCCGGGGUCCAUGAU | 1887 |
| 2485 | GUGCCUCUGGAGGAGCAAU | 1641 | 2485 | GUGCCUCUGGAGGAGCAAU | 1641 | 2503 | AUUGCUCCUCCAGAGGCAC | 1888 |
| 2503 | UGCGAAUACCUGUCCUACG | 1642 | 2503 | UGCGAAUACCUGUCCUACG | 1642 | 2521 | CGUAGGACAGGUAUUCGCA | 1889 |
| 2521 | GAUGCCAGCCAGUGGGAAU | 1643 | 2521 | GAUGCCAGCCAGUGGGAAU | 1643 | 2539 | AUUCCCACUGGCUGGCAUC | 1890 |
| 2539 | UUCCCCCGAGAGCGGCUGC | 1644 | 2539 | UUCCCCCGAGAGCGGCUGC | 1644 | 2557 | GCAGCCGCUCUCGGGGGAA | 1891 |
| 2557 | CACCUGGGGAGAGUGCUCG | 1645 | 2557 | CACCUGGGGAGAGUGCUCG | 1645 | 2575 | CGAGCACUCUCCCCAGGUG | 1892 |
| 2575 | GGCUACGGCGCCUUCGGGA | 1646 | 2575 | GGCUACGGCGCCUUCGGGA | 1646 | 2593 | UCCCGAAGGCGCCGUAGCC | 1893 |
| 2593 | AAGGUGGUGGAAGCCUCCG | 1647 | 2593 | AAGGUGGUGGAAGCCUCCG | 1647 | 2611 | CGGAGGCUUCCACCACCUU | 1894 |
| 2611 | GCUUUCGGCAUCCACAAGG | 1648 | 2611 | GCUUUCGGCAUCCACAAGG | 1648 | 2629 | CCUUGUGGAUGCCGAAAGC | 1895 |
| 2629 | GGCAGCAGCUGUGACACCG | 1649 | 2629 | GGCAGCAGCUGUGACACCG | 1649 | 2647 | CGGUGUCACAGCUGCUGCC | 1896 |
| 2647 | GUGGCCGUGAAAAUGCUGA | 1650 | 2647 | GUGGCCGUGAAAAUGCUGA | 1650 | 2665 | UCAGCAUUUUCACGGCCAC | 1897 |
| 2665 | AAAGAGGGCGCCACGGCCA | 1651 | 2665 | AAAGAGGGCGCCACGGCCA | 1651 | 2683 | UGGCCGUGGCGCCCUCUUU | 1898 |
| 2683 | AGCGAGCAGCGCGCGCUGA | 1652 | 2683 | AGCGAGCAGCGCGCGCUGA | 1652 | 2701 | UCAGCGCGCGCUGCUCGCU | 1899 |
| 2701 | AUGUCGGAGCUCAAGAUCC | 1653 | 2701 | AUGUCGGAGCUCAAGAUCC | 1653 | 2719 | GGAUCUUGAGCUCCGACAU | 1900 |
| 2719 | CUCAUUCACAUCGGCAACC | 1654 | 2719 | CUCAUUCACAUCGGCAACC | 1654 | 2737 | GGUUGCCGAUGUGAAUGAG | 1901 |
| 2737 | CACCUCAACGUGGUCAACC | 1655 | 2737 | CACCUCAACGUGGUCAACC | 1655 | 2755 | GGUUGACCACGUUGAGGUG | 1902 |
| 2755 | CUCCUCGGGGCGUGCACCA | 1656 | 2755 | CUCCUCGGGGCGUGCACCA | 1656 | 2773 | UGGUGCACGCCCCGAGGAG | 1903 |
| 2773 | AAGCCGCAGGGCCCCCUCA | 1657 | 2773 | AAGCCGCAGGGCCCCCUCA | 1657 | 2791 | UGAGGGGGCCCUGCGGCUU | 1904 |
| 2791 | AUGGUGAUCGUGGAGUUCU | 1658 | 2791 | AUGGUGAUCGUGGAGUUCU | 1658 | 2809 | AGAACUCCACGAUCACCAU | 1905 |
| 2809 | UGCAAGUACGGCAACCUCU | 1659 | 2809 | UGCAAGUACGGCAACCUCU | 1659 | 2827 | AGAGGUUGCCGUACUUGCA | 1906 |
| 2827 | UCCAACUUCCUGCGCGCCA | 1660 | 2827 | UCCAACUUCCUGCGCGCCA | 1660 | 2845 | UGGCGCGCAGGAAGUUGGA | 1907 |
| 2845 | AAGCGGGACGCCUUCAGCC | 1661 | 2845 | AAGCGGGACGCCUUCAGCC | 1661 | 2863 | GGCUGAAGGCGUCCCGCUU | 1908 |
| 2863 | CCCUGCGCGGAGAAGUCUC | 1662 | 2863 | CCCUGCGCGGAGAAGUCUC | 1662 | 2881 | GAGACUUCUCCGCGCAGGG | 1909 |
| 2881 | CCCGAGCAGCGCGGACGCU | 1663 | 2881 | CCCGAGCAGCGCGGACGCU | 1663 | 2899 | AGCGUCCGCGCUGCUCGGG | 1910 |
| 2899 | UUCCGCGCCAUGGUGGAGC | 1664 | 2899 | UUCCGCGCCAUGGUGGAGC | 1664 | 2917 | GCUCCACCAUGGCGCGGAA | 1911 |
| 2917 | CUCGCCAGGCUGGAUCGGA | 1665 | 2917 | CUCGCCAGGCUGGAUCGGA | 1665 | 2935 | UCCGAUCCAGCCUGGCGAG | 1912 |
| 2935 | AGGCGGCCGGGGAGCAGCG | 1666 | 2935 | AGGCGGCCGGGGAGCAGCG | 1666 | 2953 | CGCUGCUCCCCGGCCGCCU | 1913 |
| 2953 | GACAGGGUCCUCUUCGCGC | 1667 | 2953 | GACAGGGUCCUCUUCGCGC | 1667 | 2971 | GCGCGAAGAGGACCCUGUC | 1914 |
| 2971 | CGGUUCUCGAAGACCGAGG | 1668 | 2971 | CGGUUCUCGAAGACCGAGG | 1668 | 2989 | CCUCGGUCUUCGAGAACCG | 1915 |
| 2989 | GGCGGAGCGAGGCGGGCUU | 1669 | 2989 | GGCGGAGCGAGGCGGGCUU | 1669 | 3007 | AAGCCCGCCUCGCUCCGCC | 1916 |
| 3007 | UCUCCAGACCAAGAAGCUG | 1670 | 3007 | UCUCCAGACCAAGAAGCUG | 1670 | 3025 | CAGCUUCUUGGUCUGGAGA | 1917 |
| 3025 | GAGGACCUGUGGCUGAGCC | 1671 | 3025 | GAGGACCUGUGGCUGAGCC | 1671 | 3043 | GGCUCAGCCACAGGUCCUC | 1918 |
| 3043 | CCGCUGACCAUGGAAGAUC | 1672 | 3043 | CCGCUGACCAUGGAAGAUC | 1672 | 3061 | GAUCUUCCAUGGUCAGCGG | 1919 |
| 3061 | CUUGUCUGCUACAGCUUCC | 1673 | 3061 | CUUGUCUGCUACAGCUUCC | 1673 | 3079 | GGAAGCUGUAGCAGACAAG | 1920 |
| 3079 | CAGGUGGCCAGAGGGAUGG | 1674 | 3079 | CAGGUGGCCAGAGGGAUGG | 1674 | 3097 | CCAUCCCUCUGGCCACCUG | 1921 |
| 3097 | GAGUUCCUGGCUUCCCGAA | 1675 | 3097 | GAGUUCCUGGCUUCCCGAA | 1675 | 3115 | UUCGGGAAGCCAGGAACUC | 1922 |
| 3115 | AAGUGCAUCCACAGAGACC | 1676 | 3115 | AAGUGCAUCCACAGAGACC | 1676 | 3133 | GGUCUCUGUGGAUGCACUU | 1923 |
| 3133 | CUGGCUGCUCGGAACAUUC | 1677 | 3133 | CUGGCUGCUCGGAACAUUC | 1677 | 3151 | GAAUGUUCCGAGCAGCCAG | 1924 |
| 3151 | CUGCUGUCGGAAAGCGACG | 1678 | 3151 | CUGCUGUCGGAAAGCGACG | 1678 | 3169 | CGUCGCUUUCCGACAGCAG | 1925 |
| 3169 | GUGGUGAAGAUCUGUGACU | 1679 | 3169 | GUGGUGAAGAUCUGUGACU | 1679 | 3187 | AGUCACAGAUCUUCACCAC | 1926 |
| 3187 | UUUGGCCUUGCCCGGGACA | 1680 | 3187 | UUUGGCCUUGCCCGGGACA | 1680 | 3205 | UGUCCCGGGCAAGGCCAAA | 1927 |
| 3205 | AUCUACAAAGACCCCGACU | 1681 | 3205 | AUCUACAAAGACCCCGACU | 1681 | 3223 | AGUCGGGGUCUUUGUAGAU | 1928 |
| 3223 | UACGUCCGCAAGGGCAGUG | 1682 | 3223 | UACGUCCGCAAGGGCAGUG | 1682 | 3241 | CACUGCCCUUGCGGACGUA | 1929 |
| 3241 | GCCCGGCUGCCCCUGAAGU | 1683 | 3241 | GCCCGGCUGCCCCUGAAGU | 1683 | 3259 | ACUUCAGGGGCAGCCGGGC | 1930 |
| 3259 | UGGAUGGCCCCUGAAAGCA | 1684 | 3259 | UGGAUGGCCCCUGAAAGCA | 1684 | 3277 | UGCUUUCAGGGGCCAUCCA | 1931 |
| 3277 | AUCUUCGACAAGGUGUACA | 1685 | 3277 | AUCUUCGACAAGGUGUACA | 1685 | 3295 | UGUACACCUUGUCGAAGAU | 1932 |
| 3295 | ACCACGCAGAGUGACGUGU | 1686 | 3295 | ACCACGCAGAGUGACGUGU | 1686 | 3313 | ACACGUCACUCUGCGUGGU | 1933 |
| 3313 | UGGUCCUUUGGGGUGCUUC | 1687 | 3313 | UGGUCCUUUGGGGUGCUUC | 1687 | 3331 | GAAGCACCCCAAAGGACCA | 1934 |
| 3331 | CUCUGGGAGAUCUUCUCUC | 1688 | 3331 | CUCUGGGAGAUCUUCUCUC | 1688 | 3349 | GAGAGAAGAUCUCCCAGAG | 1935 |
| 3349 | CUGGGGGCCUCCCCGUACC | 1689 | 3349 | CUGGGGGCCUCCCCGUACC | 1689 | 3367 | GGUACGGGGAGGCCCCCAG | 1936 |
| 3367 | CCUGGGGUGCAGAUCAAUG | 1690 | 3367 | CCUGGGGUGCAGAUCAAUG | 1690 | 3385 | CAUUGAUCUGCACCCCAGG | 1937 |
| 3385 | GAGGAGUUCUGCCAGCGCG | 1691 | 3385 | GAGGAGUUCUGCCAGCGCG | 1691 | 3403 | CGCGCUGGCAGAACUCCUC | 1938 |
| 3403 | GUGAGAGACGGCACAAGGA | 1692 | 3403 | GUGAGAGACGGCACAAGGA | 1692 | 3421 | UCCUUGUGCCGUCUCUCAC | 1939 |
| 3421 | AUGAGGGCCCCGGAGCUGG | 1693 | 3421 | AUGAGGGCCCCGGAGCUGG | 1693 | 3439 | CCAGCUCCGGGGCCCUCAU | 1940 |
| 3439 | GCCACUCCCGCCAUACGCC | 1694 | 3439 | GCCACUCCCGCCAUACGCC | 1694 | 3457 | GGCGUAUGGCGGGAGUGGC | 1941 |
| 3457 | CACAUCAUGCUGAACUGCU | 1695 | 3457 | CACAUCAUGCUGAACUGCU | 1695 | 3475 | AGCAGUUCAGCAUGAUGUG | 1942 |
| 3475 | UGGUCCGGAGACCCCAAGG | 1696 | 3475 | UGGUCCGGAGACCCCAAGG | 1696 | 3493 | CCUUGGGGUCUCCGGACCA | 1943 |
| 3493 | GCGAGACCUGCAUUCUCGG | 1697 | 3493 | GCGAGACCUGCAUUCUCGG | 1697 | 3511 | CCGAGAAUGCAGGUCUCGC | 1944 |
| 3511 | GACCUGGUGGAGAUCCUGG | 1698 | 3511 | GACCUGGUGGAGAUCCUGG | 1698 | 3529 | CCAGGAUCUCCACCAGGUC | 1945 |
| 3529 | GGGGACCUGCUCCAGGGCA | 1699 | 3529 | GGGGACCUGCUCCAGGGCA | 1699 | 3547 | UGCCCUGGAGCAGGUCCCC | 1946 |
| 3547 | AGGGGCCUGCAAGAGGAAG | 1700 | 3547 | AGGGGCCUGCAAGAGGAAG | 1700 | 3565 | CUUCCUCUUGCAGGCCCCU | 1947 |
| 3565 | GAGGAGGUCUGCAUGGCCC | 1701 | 3565 | GAGGAGGUCUGCAUGGCCC | 1701 | 3583 | GGGCCAUGCAGACCUCCUC | 1948 |
| 3583 | CCGCGCAGCUCUCAGAGCU | 1702 | 3583 | CCGCGCAGCUCUCAGAGCU | 1702 | 3601 | AGCUCUGAGAGCUGCGCGG | 1949 |
| 3601 | UCAGAAGAGGGCAGCUUCU | 1703 | 3601 | UCAGAAGAGGGCAGCUUCU | 1703 | 3619 | AGAAGCUGCCCUCUUCUGA | 1950 |
| 3619 | UCGCAGGUGUCCACCAUGG | 1704 | 3619 | UCGCAGGUGUCCACCAUGG | 1704 | 3637 | CCAUGGUGGACACCUGCGA | 1951 |
| 3637 | GCCCUACACAUCGCCCAGG | 1705 | 3637 | GCCCUACACAUCGCCCAGG | 1705 | 3655 | CCUGGGCGAUGUGUAGGGC | 1952 |
| 3655 | GCUGACGCUGAGGACAGCC | 1706 | 3655 | GCUGACGCUGAGGACAGCC | 1706 | 3673 | GGCUGUCCUCAGCGUCAGC | 1953 |
| 3673 | CCGCCAAGCCUGCAGCGCC | 1707 | 3673 | CCGCCAAGCCUGCAGCGCC | 1707 | 3691 | GGCGCUGCAGGCUUGGCGG | 1954 |
| 3691 | CACAGCCUGGCCGCCAGGU | 1708 | 3691 | CACAGCCUGGCCGCCAGGU | 1708 | 3709 | ACCUGGCGGCCAGGCUGUG | 1955 |
| 3709 | UAUUACAACUGGGUGUCCU | 1709 | 3709 | UAUUACAACUGGGUGUCCU | 1709 | 3727 | AGGACACCCAGUUGUAAUA | 1956 |
| 3727 | UUUCCCGGGUGCCUGGCCA | 1710 | 3727 | UUUCCCGGGUGCCUGGCCA | 1710 | 3745 | UGGCCAGGCACCCGGGAAA | 1957 |
| 3745 | AGAGGGGCUGAGACCCGUG | 1711 | 3745 | AGAGGGGCUGAGACCCGUG | 1711 | 3763 | CACGGGUCUCAGCCCCUCU | 1958 |
| 3763 | GGUUCCUCCAGGAUGAAGA | 1712 | 3763 | GGUUCCUCCAGGAUGAAGA | 1712 | 3781 | UCUUCAUCCUGGAGGAACC | 1959 |
| 3781 | ACAUUUGAGGAAUUCCCCA | 1713 | 3781 | ACAUUUGAGGAAUUCCCCA | 1713 | 3799 | UGGGGAAUUCCUCAAAUGU | 1960 |
| 3799 | AUGACCCCAACGACCUACA | 1714 | 3799 | AUGACCCCAACGACCUACA | 1714 | 3817 | UGUAGGUCGUUGGGGUCAU | 1961 |
| 3817 | AAAGGCUCUGUGGACAACC | 1715 | 3817 | AAAGGCUCUGUGGACAACC | 1715 | 3835 | GGUUGUCCACAGAGCCUUU | 1962 |
| 3835 | CAGACAGACAGUGGGAUGG | 1716 | 3835 | CAGACAGACAGUGGGAUGG | 1716 | 3853 | CCAUCCCACUGUCUGUCUG | 1963 |
| 3853 | GUGCUGGCCUCGGAGGAGU | 1717 | 3853 | GUGCUGGCCUCGGAGGAGU | 1717 | 3871 | ACUCCUCCGAGGCCAGCAC | 1964 |
| 3871 | UUUGAGCAGAUAGAGAGCA | 1718 | 3871 | UUUGAGCAGAUAGAGAGCA | 1718 | 3889 | UGCUCUCUAUCUGCUCAAA | 1965 |
| 3889 | AGGCAUAGACAAGAAAGCG | 1719 | 3889 | AGGCAUAGACAAGAAAGCG | 1719 | 3907 | CGCUUUCUUGUCUAUGCCU | 1966 |
| 3907 | GGCUUCAGGUAGCUGAAGC | 1720 | 3907 | GGCUUCAGGUAGCUGAAGC | 1720 | 3925 | GCUUCAGCUACCUGAAGCC | 1967 |
| 3925 | CAGAGAGAGAGAAGGCAGC | 1721 | 3925 | CAGAGAGAGAGAAGGCAGC | 1721 | 3943 | GCUGCCUUCUCUCUCUCUG | 1968 |
| 3943 | CAUACGUCAGCAUUUUCUU | 1722 | 3943 | CAUACGUCAGCAUUUUCUU | 1722 | 3961 | AAGAAAAUGCUGACGUAUG | 1969 |
| 3961 | UCUCUGCACUUAUAAGAAA | 1723 | 3961 | UCUCUGCACUUAUAAGAAA | 1723 | 3979 | UUUCUUAUAAGUGCAGAGA | 1970 |
| 3979 | AGAUCAAAGACUUUAAGAC | 1724 | 3979 | AGAUCAAAGACUUUAAGAC | 1724 | 3997 | GUCUUAAAGUCUUUGAUCU | 1971 |
| 3997 | CUUUCGCUAUUUCUUCUAC | 1725 | 3997 | CUUUCGCUAUUUCUUCUAC | 1725 | 4015 | GUAGAAGAAAUAGCGAAAG | 1972 |
| 4015 | CUGCUAUCUACUACAAACU | 1726 | 4015 | CUGCUAUCUACUACAAACU | 1726 | 4033 | AGUUUGUAGUAGAUAGCAG | 1973 |
| 4033 | UUCAAAGAGGAACCAGGAG | 1727 | 4033 | UUCAAAGAGGAACCAGGAG | 1727 | 4051 | CUCCUGGUUCCUCUUUGAA | 1974 |
| 4051 | GGACAAGAGGAGCAUGAAA | 1728 | 4051 | GGACAAGAGGAGCAUGAAA | 1728 | 4069 | UUUCAUGCUCCUCUUGUCC | 1975 |
| 4069 | AGUGGACAAGGAGUGUGAC | 1729 | 4069 | AGUGGACAAGGAGUGUGAC | 1729 | 4087 | GUCACACUCCUUGUCCACU | 1976 |
| 4087 | CCACUGAAGCACCACAGGG | 1730 | 4087 | CCACUGAAGCACCACAGGG | 1730 | 4105 | CCCUGUGGUGCUUCAGUGG | 1977 |
| 4105 | GAGGGGUUAGGCCUCCGGA | 1731 | 4105 | GAGGGGUUAGGCCUCCGGA | 1731 | 4123 | UCCGGAGGCCUAACCCCUC | 1978 |
| 4123 | AUGACUGCGGGCAGGCCUG | 1732 | 4123 | AUGACUGCGGGCAGGCCUG | 1732 | 4141 | CAGGCCUGCCCGCAGUCAU | 1979 |
| 4141 | GGAUAAUAUCCAGCCUCCC | 1733 | 4141 | GGAUAAUAUCCAGCCUCCC | 1733 | 4159 | GGGAGGCUGGAUAUUAUCC | 1980 |
| 4159 | CACAAGAAGCUGGUGGAGC | 1734 | 4159 | CACAAGAAGCUGGUGGAGC | 1734 | 4177 | GCUCCACCAGCUUCUUGUG | 1981 |
| 4177 | CAGAGUGUUCCCUGACUCC | 1735 | 4177 | CAGAGUGUUCCCUGACUCC | 1735 | 4195 | GGAGUCAGGGAACACUCUG | 1982 |
| 4195 | CUCCAAGGAAAGGGAGACG | 1736 | 4195 | CUCCAAGGAAAGGGAGACG | 1736 | 4213 | CGUCUCCCUUUCCUUGGAG | 1983 |
| 4213 | GCCCUUUCAUGGUCUGCUG | 1737 | 4213 | GCCCUUUCAUGGUCUGCUG | 1737 | 4231 | CAGCAGACCAUGAAAGGGC | 1984 |
| 4231 | GAGUAACAGGUGCCUUCCC | 1738 | 4231 | GAGUAACAGGUGCCUUCCC | 1738 | 4249 | GGGAAGGCACCUGUUACUC | 1985 |
| 4249 | CAGACACUGGCGUUACUGC | 1739 | 4249 | CAGACACUGGCGUUACUGC | 1739 | 4267 | GCAGUAACGCCAGUGUCUG | 1986 |
| 4267 | CUUGACCAAAGAGCCCUCA | 1740 | 4267 | CUUGACCAAAGAGCCCUCA | 1740 | 4285 | UGAGGGCUCUUUGGUCAAG | 1987 |
| 4285 | AAGCGGCCCUUAUGCCAGC | 1741 | 4285 | AAGCGGCCCUUAUGCCAGC | 1741 | 4303 | GCUGGCAUAAGGGCCGCUU | 1988 |
| 4303 | CGUGACAGAGGGCUCACCU | 1742 | 4303 | CGUGACAGAGGGCUCACCU | 1742 | 4321 | AGGUGAGCCCUCUGUCACG | 1989 |
| 4321 | UCUUGCCUUCUAGGUCACU | 1743 | 4321 | UCUUGCCUUCUAGGUCACU | 1743 | 4339 | AGUGACCUAGAAGGCAAGA | 1990 |
| 4339 | UUCUCACAAUGUCCCUUCA | 1744 | 4339 | UUCUCACAAUGUCCCUUCA | 1744 | 4357 | UGAAGGGACAUUGUGAGAA | 1991 |
| 4357 | AGCACCUGACCCUGUGCCC | 1745 | 4357 | AGCACCUGACCCUGUGCCC | 1745 | 4375 | GGGCACAGGGUCAGGUGCU | 1992 |
| 4375 | CGCCGAUUAUUCCUUGGUA | 1746 | 4375 | CGCCGAUUAUUCCUUGGUA | 1746 | 4393 | UACCAAGGAAUAAUCGGCG | 1993 |
| 4393 | AAUAUGAGUAAUACAUCAA | 1747 | 4393 | AAUAUGAGUAAUACAUCAA | 1747 | 4411 | UUGAUGUAUUACUCAUAUU | 1994 |
| 4411 | AAGAGUAGUAUUAAAAGCU | 1748 | 4411 | AAGAGUAGUAUUAAAAGCU | 1748 | 4429 | AGCUUUUAAUACUACUCUU | 1995 |
| 4429 | UAAUUAAUCAUGUUUAUAA | 1749 | 4429 | UAAUUAAUCAUGUUUAUAA | 1749 | 4447 | UUAUAAACAUGAUUAAUUA | 1996 |

VEGF NM_003376.3

| | | |
|---|---|---|
| Seq | Seq | Seq |

| | | | | | | | | |
|---|---|---|---|---|---|---|---|---|
| Pos | Seq | ID | UPos | Upper seq | ID | LPos | Lower seq | ID |

| | | | | | | | | |
|---|---|---|---|---|---|---|---|---|
| 3 | GCGGAGGCUUGGGGCAGCC | 1997 | 3 | GCGGAGGCUUGGGGCAGCC | 1997 | 21 | GGCUGCCCCAAGCCUCCGC | 2093 |
| 21 | CGGGUAGCUCGGAGGUCGU | 1998 | 21 | CGGGUAGCUCGGAGGUCGU | 1998 | 39 | ACGACCUCCGAGCUACCCG | 2094 |
| 39 | UGGCGCUGGGGGCUAGCAC | 1999 | 39 | UGGCGCUGGGGGCUAGCAC | 1999 | 57 | GUGCUAGCCCCCAGCGCCA | 2095 |
| 57 | CCAGCGCUCUGUCGGGAGG | 2000 | 57 | CCAGCGCUCUGUCGGGAGG | 2000 | 75 | CCUCCCGACAGAGCGCUGG | 2096 |
| 75 | GCGCAGCGGUUAGGUGGAC | 2001 | 75 | GCGCAGCGGUUAGGUGGAC | 2001 | 93 | GUCCACCUAACCGCUGCGC | 2097 |
| 93 | CCGGUCAGCGGACUCACCG | 2002 | 93 | CCGGUCAGCGGACUCACCG | 2002 | 111 | CGGUGAGUCCGCUGACCGG | 2098 |
| 111 | GGCCAGGGCGCUCGGUGCU | 2003 | 111 | GGCCAGGGCGCUCGGUGCU | 2003 | 129 | AGCACCGAGCGCCCUGGCC | 2099 |
| 129 | UGGAAUUUGAUAUUCAUUG | 2004 | 129 | UGGAAUUUGAUAUUCAUUG | 2004 | 147 | CAAUGAAUAUCAAAUUCCA | 2100 |
| 147 | GAUCCGGGUUUUAUCCCUC | 2005 | 147 | GAUCCGGGUUUUAUCCCUC | 2005 | 165 | GAGGGAUAAAACCCGGAUC | 2101 |
| 165 | CUUCUUUUUUCUUAAACAU | 2006 | 165 | CUUCUUUUUUCUUAAACAU | 2006 | 183 | AUGUUUAAGAAAAAAGAAG | 2102 |
| 183 | UUUUUUUUUAAAACUGUAU | 2007 | 183 | UUUUUUUUUAAAACUGUAU | 2007 | 201 | AUACAGUUUUAAAAAAAAA | 2103 |
| 201 | UUGUUUCUCGUUUUAAUUU | 2008 | 201 | UUGUUUCUCGUUUUAAUUU | 2008 | 219 | AAAUUAAAACGAGAAACAA | 2104 |
| 219 | UAUUUUUGCUUGCCAUUCC | 2009 | 219 | UAUUUUUGCUUGCCAUUCC | 2009 | 237 | GGAAUGGCAAGCAAAAAUA | 2105 |
| 237 | CCCACUUGAAUCGGGCCGA | 2010 | 237 | CCCACUUGAAUCGGGCCGA | 2010 | 255 | UCGGCCCGAUUCAAGUGGG | 2106 |
| 255 | ACGGCUUGGGGAGAUUGCU | 2011 | 255 | ACGGCUUGGGGAGAUUGCU | 2011 | 273 | AGCAAUCUCCCCAAGCCGU | 2107 |
| 273 | UCUACUUCCCCAAAUCACU | 2012 | 273 | UCUACUUCCCCAAAUCACU | 2012 | 291 | AGUGAUUUGGGGAAGUAGA | 2108 |
| 291 | UGUGGAUUUUGGAAACCAG | 2013 | 291 | UGUGGAUUUUGGAAACCAG | 2013 | 309 | CUGGUUUCCAAAAUCCACA | 2109 |
| 309 | GCAGAAAGAGGAAAGAGGU | 2014 | 309 | GCAGAAAGAGGAAAGAGGU | 2014 | 327 | ACCUCUUUCCUCUUUCUGC | 2110 |
| 327 | UAGCAAGAGCUCCAGAGAG | 2015 | 327 | UAGCAAGAGCUCCAGAGAG | 2015 | 345 | CUCUCUGGAGCUCUUGCUA | 2111 |
| 345 | GAAGUCGAGGAAGAGAGAG | 2016 | 345 | GAAGUCGAGGAAGAGAGAG | 2016 | 363 | CUCUCUCUUCCUCGACUUC | 2112 |
| 363 | GACGGGGUCAGAGAGAGCG | 2017 | 363 | GACGGGGUCAGAGAGAGCG | 2017 | 381 | CGCUCUCUCUGACCCCGUC | 2113 |
| 381 | GCGCGGGCGUGCGAGCAGC | 2018 | 381 | GCGCGGGCGUGCGAGCAGC | 2018 | 399 | GCUGCUCGCACGCCCGCGC | 2114 |
| 399 | CGAAAGCGACAGGGGCAAA | 2019 | 399 | CGAAAGCGACAGGGGCAAA | 2019 | 417 | UUUGCCCCUGUCGCUUUCG | 2115 |
| 417 | AGUGAGUGACCUGCUUUUG | 2020 | 417 | AGUGAGUGACCUGCUUUUG | 2020 | 435 | CAAAAGCAGGUCACUCACU | 2116 |
| 435 | GGGGGUGACCGCCGGAGCG | 2021 | 435 | GGGGGUGACCGCCGGAGCG | 2021 | 453 | CGCUCCGGCGGUCACCCCC | 2117 |
| 453 | GCGGCGUGAGCCCUCCCCC | 2022 | 453 | GCGGCGUGAGCCCUCCCCC | 2022 | 471 | GGGGGAGGGCUCACGCCGC | 2118 |
| 471 | CUUGGGAUCCCGCAGCUGA | 2023 | 471 | CUUGGGAUCCCGCAGCUGA | 2023 | 489 | UCAGCUGCGGGAUCCCAAG | 2119 |
| 489 | ACCAGUCGCGCUGACGGAC | 2024 | 489 | ACCAGUCGCGCUGACGGAC | 2024 | 507 | GUCCGUCAGCGCGACUGGU | 2120 |
| 507 | CAGACAGACAGACACCGCC | 2025 | 507 | CAGACAGACAGACACCGCC | 2025 | 525 | GGCGGUGUCUGUCUGUCUG | 2121 |
| 525 | CCCCAGCCCCAGCUACCAC | 2026 | 525 | CCCCAGCCCCAGCUACCAC | 2026 | 543 | GUGGUAGCUGGGGCUGGGG | 2122 |
| 543 | CCUCCUCCCCGGCCGGCGG | 2027 | 543 | CCUCCUCCCCGGCCGGCGG | 2027 | 561 | CCGCCGGCCGGGGAGGAGG | 2123 |
| 561 | GCGGACAGUGGACGCGGCG | 2028 | 561 | GCGGACAGUGGACGCGGCG | 2028 | 579 | CGCCGCGUCCACUGUCCGC | 2124 |
| 579 | GGCGAGCCGCGGGCAGGGG | 2029 | 579 | GGCGAGCCGCGGGCAGGGG | 2029 | 597 | CCCCUGCCCGCGGCUCGCC | 2125 |
| 597 | GCCGGAGCCCGCGCCCGGA | 2030 | 597 | GCCGGAGCCCGCGCCCGGA | 2030 | 615 | UCCGGGCGCGGGCUCCGGC | 2126 |
| 615 | AGGCGGGGUGGAGGGGGUC | 2031 | 615 | AGGCGGGGUGGAGGGGGUC | 2031 | 633 | GACCCCCUCCACCCCGCCU | 2127 |
| 633 | CGGGGCUCGCGGCGUCGCA | 2032 | 633 | CGGGGCUCGCGGCGUCGCA | 2032 | 651 | UGCGACGCCGCGAGCCCCG | 2128 |
| 651 | ACUGAAACUUUUCGUCCAA | 2033 | 651 | ACUGAAACUUUUCGUCCAA | 2033 | 669 | UUGGACGAAAAGUUUCAGU | 2129 |
| 669 | ACUUCUGGGCUGUUCUCGC | 2034 | 669 | ACUUCUGGGCUGUUCUCGC | 2034 | 687 | GCGAGAACAGCCCAGAAGU | 2130 |
| 687 | CUUCGGAGGAGCCGUGGUC | 2035 | 687 | CUUCGGAGGAGCCGUGGUC | 2035 | 705 | GACCACGGCUCCUCCGAAG | 2131 |
| 705 | CCGCGCGGGGGAAGCCGAG | 2036 | 705 | CCGCGCGGGGGAAGCCGAG | 2036 | 723 | CUCGGCUUCCCCCGCGCGG | 2132 |
| 723 | GCCGAGCGGAGCCGCGAGA | 2037 | 723 | GCCGAGCGGAGCCGCGAGA | 2037 | 741 | UCUCGCGGCUCCGCUCGGC | 2133 |
| 741 | AAGUGCUAGCUCGGGCCGG | 2038 | 741 | AAGUGCUAGCUCGGGCCGG | 2038 | 759 | CCGGCCCGAGCUAGCACUU | 2134 |
| 759 | GGAGGAGCCGCAGCCGGAG | 2039 | 759 | GGAGGAGCCGCAGCCGGAG | 2039 | 777 | CUCCGGCUGCGGCUCCUCC | 2135 |
| 777 | GGAGGGGGAGGAGGAAGAA | 2040 | 777 | GGAGGGGGAGGAGGAAGAA | 2040 | 795 | UUCUUCCUCCUCCCCCUCC | 2136 |
| 795 | AGAGAAGGAAGAGGAGAGG | 2041 | 795 | AGAGAAGGAAGAGGAGAGG | 2041 | 813 | CCUCUCCUCUUCCUUCUCU | 2137 |
| 813 | GGGGCCGCAGUGGCGACUC | 2042 | 813 | GGGGCCGCAGUGGCGACUC | 2042 | 831 | GAGUCGCCACUGCGGCCCC | 2138 |
| 831 | CGGCGCUCGGAAGCCGGGC | 2043 | 831 | CGGCGCUCGGAAGCCGGGC | 2043 | 849 | GCCCGGCUUCCGAGCGCCG | 2139 |
| 849 | CUCAUGGACGGGUGAGGCG | 2044 | 849 | CUCAUGGACGGGUGAGGCG | 2044 | 867 | CGCCUCACCCGUCCAUGAG | 2140 |
| 867 | GGCGGUGUGCGCAGACAGU | 2045 | 867 | GGCGGUGUGCGCAGACAGU | 2045 | 885 | ACUGUCUGCGCACACCGCC | 2141 |
| 885 | UGCUCCAGCCGCGCGCGCU | 2046 | 885 | UGCUCCAGCCGCGCGCGCU | 2046 | 903 | AGCGCGCGCGGCUGGAGCA | 2142 |
| 903 | UCCCCAGGCCCUGGCCCGG | 2047 | 903 | UCCCCAGGCCCUGGCCCGG | 2047 | 921 | CCGGGCCAGGGCCUGGGGA | 2143 |
| 921 | GGCCUCGGGCCGGGGAGGA | 2048 | 921 | GGCCUCGGGCCGGGGAGGA | 2048 | 939 | UCCUCCCCGGCCCGAGGCC | 2144 |
| 939 | AAGAGUAGCUCGCCGAGGC | 2049 | 939 | AAGAGUAGCUCGCCGAGGC | 2049 | 957 | GCCUCGGCGAGCUACUCUU | 2145 |
| 957 | CGCCGAGGAGAGCGGGCCG | 2050 | 957 | CGCCGAGGAGAGCGGGCCG | 2050 | 975 | CGGCCCGCUCUCCUCGGCG | 2146 |
| 975 | GCCCCACAGCCCGAGCCGG | 2051 | 975 | GCCCCACAGCCCGAGCCGG | 2051 | 993 | CCGGCUCGGGCUGUGGGGC | 2147 |
| 993 | GAGAGGGAGCGCGAGCCGC | 2052 | 993 | GAGAGGGAGCGCGAGCCGC | 2052 | 1011 | GCGGCUCGCGCUCCCUCUC | 2148 |
| 1011 | CGCCGGCCCCGGUCGGGCC | 2053 | 1011 | CGCCGGCCCCGGUCGGGCC | 2053 | 1029 | GGCCCGACCGGGGCCGGCG | 2149 |
| 1029 | CUCCGAAACCAUGAACUUU | 2054 | 1029 | CUCCGAAACCAUGAACUUU | 2054 | 1047 | AAAGUUCAUGGUUUCGGAG | 2150 |
| 1047 | UCUGCUGUCUUGGGUGCAU | 2055 | 1047 | UCUGCUGUCUUGGGUGCAU | 2055 | 1065 | AUGCACCCAAGACAGCAGA | 2151 |
| 1065 | UUGGAGCCUUGCCUUGCUG | 2056 | 1065 | UUGGAGCCUUGCCUUGCUG | 2056 | 1083 | CAGCAAGGCAAGGCUCCAA | 2152 |
| 1083 | GCUCUACCUCCACCAUGCC | 2057 | 1083 | GCUCUACCUCCACCAUGCC | 2057 | 1101 | GGCAUGGUGGAGGUAGAGC | 2153 |
| 1101 | CAAGUGGUCCCAGGCUGCA | 2058 | 1101 | CAAGUGGUCCCAGGCUGCA | 2058 | 1119 | UGCAGCCUGGGACCACUUG | 2154 |
| 1119 | ACCCAUGGCAGAAGGAGGA | 2059 | 1119 | ACCCAUGGCAGAAGGAGGA | 2059 | 1137 | UCCUCCUUCUGCCAUGGGU | 2155 |
| 1137 | AGGGCAGAAUCAUCACGAA | 2060 | 1137 | AGGGCAGAAUCAUCACGAA | 2060 | 1155 | UUCGUGAUGAUUCUGCCCU | 2156 |
| 1155 | AGUGGUGAAGUUCAUGGAU | 2061 | 1155 | AGUGGUGAAGUUCAUGGAU | 2061 | 1173 | AUCCAUGAACUUCACCACU | 2157 |
| 1173 | UGUCUAUCAGCGCAGCUAC | 2062 | 1173 | UGUCUAUCAGCGCAGCUAC | 2062 | 1191 | GUAGCUGCGCUGAUAGACA | 2158 |
| 1191 | CUGCCAUCCAAUCGAGACC | 2063 | 1191 | CUGCCAUCCAAUCGAGACC | 2063 | 1209 | GGUCUCGAUUGGAUGGCAG | 2159 |
| 1209 | CCUGGUGGACAUCUUCCAG | 2064 | 1209 | CCUGGUGGACAUCUUCCAG | 2064 | 1227 | CUGGAAGAUGUCCACCAGG | 2160 |
| 1227 | GGAGUACCCUGAUGAGAUC | 2065 | 1227 | GGAGUACCCUGAUGAGAUC | 2065 | 1245 | GAUCUCAUCAGGGUACUCC | 2161 |
| 1245 | CGAGUACAUCUUCAAGCCA | 2066 | 1245 | CGAGUACAUCUUCAAGCCA | 2066 | 1263 | UGGCUUGAAGAUGUACUCG | 2162 |
| 1263 | AUCCUGUGUGCCCCUGAUG | 2067 | 1263 | AUCCUGUGUGCCCCUGAUG | 2067 | 1281 | CAUCAGGGGCACACAGGAU | 2163 |
| 1281 | GCGAUGCGGGGGCUGCUGC | 2068 | 1281 | GCGAUGCGGGGGCUGCUGC | 2068 | 1299 | GCAGCAGCCCCCGCAUCGC | 2164 |
| 1299 | CAAUGACGAGGGCCUGGAG | 2069 | 1299 | CAAUGACGAGGGCCUGGAG | 2069 | 1317 | CUCCAGGCCCUCGUCAUUG | 2165 |
| 1317 | GUGUGUGCCCACUGAGGAG | 2070 | 1317 | GUGUGUGCCCACUGAGGAG | 2070 | 1335 | CUCCUCAGUGGGCACACAC | 2166 |
| 1335 | GUCCAACAUCACCAUGCAG | 2071 | 1335 | GUCCAACAUCACCAUGCAG | 2071 | 1353 | CUGCAUGGUGAUGUUGGAC | 2167 |
| 1353 | GAUUAUGCGGAUCAAACCU | 2072 | 1353 | GAUUAUGCGGAUCAAACCU | 2072 | 1371 | AGGUUUGAUCCGCAUAAUC | 2168 |
| 1371 | UCACCAAGGCCAGCACAUA | 2073 | 1371 | UCACCAAGGCCAGCACAUA | 2073 | 1389 | UAUGUGCUGGCCUUGGUGA | 2169 |
| 1389 | AGGAGAGAUGAGCUUCCUA | 2074 | 1389 | AGGAGAGAUGAGCUUCCUA | 2074 | 1407 | UAGGAAGCUCAUCUCUCCU | 2170 |
| 1407 | ACAGCACAACAAAUGUGAA | 2075 | 1407 | ACAGCACAACAAAUGUGAA | 2075 | 1425 | UUCACAUUUGUUGUGCUGU | 2171 |
| 1425 | AUGCAGACCAAAGAAAGAU | 2076 | 1425 | AUGCAGACCAAAGAAAGAU | 2076 | 1443 | AUCUUUCUUUGGUCUGCAU | 2172 |
| 1443 | UAGAGCAAGACAAGAAAAA | 2077 | 1443 | UAGAGCAAGACAAGAAAAA | 2077 | 1461 | UUUUUCUUGUCUUGCUCUA | 2173 |
| 1461 | AAAAUCAGUUCGAGGAAAG | 2078 | 1461 | AAAAUCAGUUCGAGGAAAG | 2078 | 1479 | CUUUCCUCGAACUGAUUUU | 2174 |
| 1479 | GGGAAAGGGGCAAAAACGA | 2079 | 1479 | GGGAAAGGGGCAAAAACGA | 2079 | 1497 | UCGUUUUUGCCCCUUUCCC | 2175 |
| 1497 | AAAGCGCAAGAAAUCCCGG | 2080 | 1497 | AAAGCGCAAGAAAUCCCGG | 2080 | 1515 | CCGGGAUUUCUUGCGCUUU | 2176 |
| 1515 | GUAUAAGUCCUGGAGCGUU | 2081 | 1515 | GUAUAAGUCCUGGAGCGUU | 2081 | 1533 | AACGCUCCAGGACUUAUAC | 2177 |
| 1533 | UCCCUGUGGGCCUUGCUCA | 2082 | 1533 | UCCCUGUGGGCCUUGCUCA | 2082 | 1551 | UGAGCAAGGCCCACAGGGA | 2178 |
| 1551 | AGAGCGGAGAAAGCAUUUG | 2083 | 1551 | AGAGCGGAGAAAGCAUUUG | 2083 | 1569 | CAAAUGCUUUCUCCGCUCU | 2179 |
| 1569 | GUUUGUACAAGAUCCGCAG | 2084 | 1569 | GUUUGUACAAGAUCCGCAG | 2084 | 1587 | CUGCGGAUCUUGUACAAAC | 2180 |
| 1587 | GACGUGUAAAUGUUCCUGC | 2085 | 1587 | GACGUGUAAAUGUUCCUGC | 2085 | 1605 | GCAGGAACAUUUACACGUC | 2181 |
| 1605 | CAAAAACACAGACUCGCGU | 2086 | 1605 | CAAAAACACAGACUCGCGU | 2086 | 1623 | ACGCGAGUCUGUGUUUUUG | 2182 |
| 1623 | UUGCAAGGCGAGGCAGCUU | 2087 | 1623 | UUGCAAGGCGAGGCAGCUU | 2087 | 1641 | AAGCUGCCUCGCCUUGCAA | 2183 |
| 1641 | UGAGUUAAACGAACGUACU | 2088 | 1641 | UGAGUUAAACGAACGUACU | 2088 | 1659 | AGUACGUUCGUUUAACUCA | 2184 |
| 1659 | UUGCAGAUGUGACAAGCCG | 2089 | 1659 | UUGCAGAUGUGACAAGCCG | 2089 | 1677 | CGGCUUGUCACAUCUGCAA | 2185 |
| 1677 | GAGGCGGUGAGCCGGGCAG | 2090 | 1677 | GAGGCGGUGAGCCGGGCAG | 2090 | 1695 | CUGCCCGGCUCACCGCCUC | 2186 |
| 1695 | GGAGGAAGGAGCCUCCCUC | 2091 | 1695 | GGAGGAAGGAGCCUCCCUC | 2091 | 1713 | GAGGGAGGCUCCUUCCUCC | 2187 |
| 1703 | GAGCCUCCCUCAGGGUUUC | 2092 | 1703 | GAGCCUCCCUCAGGGUUUC | 2092 | 1721 | GAAACCCUGAGGGAGGCUC | 2188 |

Sequence Alignments: Lower case shows mismatches

SEQ

| | | | | |
|---|---|---|---|---|
| Gene | Pos | Sequence | Upper Case Seq | ID |

| | | | | |
|---|---|---|---|---|
| hFLT1 | 3645 | AUCAUGCUGGACUGCUGGCACAG | AUCAUGCUGGACUGCUGGCACAG | 2189 |
| hKDR | 3717 | AcCAUGCUGGACUGCUGGCACgG | ACCAUGCUGGACUGCUGGCACGG | 2190 |
| mFLT1 | 3422 | AUCAUGUUGGAUUGCUGGCACAa | AUCAUGUUGGAUUGCUGGCACAA | 2191 |
| mKDR | 3615 | AcCAUGCUGGACUGCUGGCAUga | ACCAUGCUGGACUGCUGGCAUGA | 2192 |
| rFLT1 | 3632 | AUCAUGCUGGAUUGCUGGCACAa | AUCAUGCUGGAUUGCUGGCACAA | 2193 |
| rKDR | 3650 | AcCAUGCUGGAUUGCUGGCAUga | ACCAUGCUGGAUUGCUGGCAUGA | 2194 |
| hFLT1 | 3646 | UCAUGCUGGACUGCUGGCACAGA | UCAUGCUGGACUGCUGGCACAGA | 2195 |
| hKDR | 3718 | cCAUGCUGGACUGCUGGCACgGg | CCAUGCUGGACUGCUGGCACGGG | 2196 |
| mFLT1 | 3423 | UCAUGUUGGAUUGCUGGCACAaA | UCAUGUUGGAUUGCUGGCACAAA | 2197 |
| mKDR | 3616 | cCAUGCUGGACUGCUGGCAUgag | CCAUGCUGGACUGCUGGCAUGAG | 2198 |
| rFLT1 | 3633 | UCAUGCUGGAUUGCUGGCACAaA | UCAUGCUGGAUUGCUGGCACAAA | 2199 |
| rKDR | 3651 | cCAUGCUGGAUUGCUGGCAUgag | CCAUGCUGGAUUGCUGGCAUGAG | 2200 |
| hFLT1 | 3647 | CAUGCUGGACUGCUGGCACAGAG | CAUGCUGGACUGCUGGCACAGAG | 2201 |
| hKDR | 3719 | cAUGCUGGACUGCUGGCACgGgG | CAUGCUGGACUGCUGGCACGGGG | 2202 |
| mFLT1 | 3424 | CAUGUUGGAUUGCUGGCACAaAG | CAUGUUGGAUUGCUGGCACAAAG | 2203 |
| mKDR | 3617 | CAUGCUGGACUGCUGGCAUgagG | CAUGCUGGACUGCUGGCAUGAGG | 2204 |
| rFLT1 | 3634 | CAUGCUGGAUUGCUGGCACAaAG | CAUGCUGGAUUGCUGGCACAAAG | 2205 |
| rKDR | 3652 | CAUGCUGGAUUGCUGGCAUgagG | CAUGCUGGAUUGCUGGCAUGAGG | 2206 |
| hKDR | 2764 | UGCCUUAUGAUGCCAGCAAAUGG | UGCCUUAUGAUGCCAGCAAAUGG | 2207 |
| hFLT1 | 2689 | UcCCUUAUGAUGCCAGCAAgUGG | UCCCUUAUGAUGCCAGCAAGUGG | 2208 |
| mFLT1 | 2469 | UGCCcUAUGAUGCCAGCAAgUGG | UGCCCUAUGAUGCCAGCAAGUGG | 2209 |
| mKDR | 2662 | UGCCUUAUGAUGCCAGCAAgUGG | UGCCUUAUGAUGCCAGCAAGUGG | 2210 |
| rFLT1 | 2676 | UGCCcUAUGAUGCCAGCAAgUGG | UGCCCUAUGAUGCCAGCAAGUGG | 2209 |
| rKDR | 2697 | UGCCUUAUGAUGCCAGCAAgUGG | UGCCUUAUGAUGCCAGCAAGUGG | 2210 |
| hKDR | 2765 | GCCUUAUGAUGCCAGCAAAUGGG | GCCUUAUGAUGCCAGCAAAUGGG | 2211 |
| hFLT1 | 2690 | cCCUUAUGAUGCCAGCAAgUGGG | CCCUUAUGAUGCCAGCAAGUGGG | 2212 |
| mFLT1 | 2470 | GCCcUAUGAUGCCAGCAAgUGGG | GCCCUAUGAUGCCAGCAAGUGGG | 2213 |
| mKDR | 2663 | GCCUUAUGAUGCCAGCAAgUGGG | GCCUUAUGAUGCCAGCAAGUGGG | 2214 |
| rFLT1 | 2677 | GCCcUAUGAUGCCAGCAAgUGGG | GCCCUAUGAUGCCAGCAAGUGGG | 2213 |
| rKDR | 2698 | GCCUUAUGAUGCCAGCAAgUGGG | GCCUUAUGAUGCCAGCAAGUGGG | 2214 |
| hKDR | 2766 | CCUUAUGAUGCCAGCAAAUGGGA | CCUUAUGAUGCCAGCAAAUGGGA | 2215 |
| hFLT1 | 2691 | CCUUAUGAUGCCAGCAAgUGGGA | CCUUAUGAUGCCAGCAAGUGGGA | 2216 |
| mFLT1 | 2471 | CCcUAUGAUGCCAGCAAgUGGGA | CCCUAUGAUGCCAGCAAGUGGGA | 2217 |
| mKDR | 2664 | CCUUAUGAUGCCAGCAAgUGGGA | CCUUAUGAUGCCAGCAAGUGGGA | 2216 |
| rFLT1 | 2678 | CCcUAUGAUGCCAGCAAgUGGGA | CCCUAUGAUGCCAGCAAGUGGGA | 2217 |
| rKDR | 2699 | CCUUAUGAUGCCAGCAAgUGGGA | CCUUAUGAUGCCAGCAAGUGGGA | 2216 |
| hKDR | 2767 | CUUAUGAUGCCAGCAAAUGGGAA | CUUAUGAUGCCAGCAAAUGGGAA | 2218 |
| hFLT1 | 2692 | CUUAUGAUGCCAGCAAgUGGGAg | CUUAUGAUGCCAGCAAGUGGGAG | 2219 |
| mFLT1 | 2472 | CcUAUGAUGCCAGCAAgUGGGAg | CCUAUGAUGCCAGCAAGUGGGAG | 2220 |
| mKDR | 2665 | CUUAUGAUGCCAGCAAgUGGGAA | CUUAUGAUGCCAGCAAGUGGGAA | 2221 |
| rFLT1 | 2679 | CcUAUGAUGCCAGCAAgUGGGAg | CCUAUGAUGCCAGCAAGUGGGAG | 2220 |
| rKDR | 2700 | CUUAUGAUGCCAGCAAgUGGGAg | CUUAUGAUGCCAGCAAGUGGGAG | 2219 |
| hKDR | 2768 | UUAUGAUGCCAGCAAAUGGGAAU | UUAUGAUGCCAGCAAAUGGGAAU | 2222 |
| hFLT1 | 2693 | UUAUGAUGCCAGCAAgUGGGAgU | UUAUGAUGCCAGCAAGUGGGAGU | 2223 |
| mFLT1 | 2473 | cUAUGAUGCCAGCAAgUGGGAgU | CUAUGAUGCCAGCAAGUGGGAGU | 2224 |
| mKDR | 2666 | UUAUGAUGCCAGCAAgUGGGAAU | UUAUGAUGCCAGCAAGUGGGAAU | 2225 |
| rFLT1 | 2680 | cUAUGAUGCCAGCAAgUGGGAgU | CUAUGAUGCCAGCAAGUGGGAGU | 2224 |
| rKDR | 2701 | UUAUGAUGCCAGCAAgUGGGAgU | UUAUGAUGCCAGCAAGUGGGAGU | 2223 |
| hKDR | 3712 | ACCAGACCAUGCUGGACUGCUGG | ACCAGACCAUGCUGGACUGCUGG | 2226 |
| hFLT1 | 3640 | AUCAGAUCAUGCUGGACUGCUGG | AUCAGAUCAUGCUGGACUGCUGG | 2227 |
| mFLT1 | 3417 | ACCAaAUCAUGUUGGAUUGCUGG | ACCAAAUCAUGUUGGAUUGCUGG | 2228 |
| mKDR | 3610 | ACCAGACCAUGCUGGACUGCUGG | ACCAGACCAUGCUGGACUGCUGG | 2226 |
| rFLT1 | 3627 | ACCAaAUCAUGCUGGAUUGCUGG | ACCAAAUCAUGCUGGAUUGCUGG | 2229 |
| rKDR | 3645 | ACCAaACCAUGCUGGAUUGCUGG | ACCAAACCAUGCUGGAUUGCUGG | 2230 |
| hKDR | 3713 | CCAGACCAUGCUGGACUGCUGGC | CCAGACCAUGCUGGACUGCUGGC | 2231 |
| hFLT1 | 3641 | UCAGAUCAUGCUGGACUGCUGGC | UCAGAUCAUGCUGGACUGCUGGC | 2232 |
| mFLT1 | 3418 | CCAaAUCAUGUUGGAUUGCUGGC | CCAAAUCAUGUUGGAUUGCUGGC | 2233 |
| mKDR | 3611 | CCAGACCAUGCUGGACUGCUGGC | CCAGACCAUGCUGGACUGCUGGC | 2231 |
| rFLT1 | 3628 | CCAaAUCAUGCUGGAUUGCUGGC | CCAAAUCAUGCUGGAUUGCUGGC | 2234 |
| rKDR | 3646 | CCAaACCAUGCUGGAUUGCUGGC | CCAAACCAUGCUGGAUUGCUGGC | 2235 |
| hKDR | 3714 | CAGACCAUGCUGGACUGCUGGCA | CAGACCAUGCUGGACUGCUGGCA | 2236 |
| hFLT1 | 3642 | CAGAUCAUGCUGGACUGCUGGCA | CAGAUCAUGCUGGACUGCUGGCA | 2237 |
| mFLT1 | 3419 | CAaAUCAUGUUGGAUUGCUGGCA | CAAAUCAUGUUGGAUUGCUGGCA | 2238 |
| mKDR | 3612 | CAGACCAUGCUGGACUGCUGGCA | CAGACCAUGCUGGACUGCUGGCA | 2236 |
| rFLT1 | 3629 | CAaAUCAUGCUGGAUUGCUGGCA | CAAAUCAUGCUGGAUUGCUGGCA | 2239 |
| rKDR | 3647 | CAaACCAUGCUGGAUUGCUGGCA | CAAACCAUGCUGGAUUGCUGGCA | 2240 |
| hKDR | 3715 | AGACCAUGCUGGACUGCUGGCAC | AGACCAUGCUGGACUGCUGGCAC | 2241 |
| hFLT1 | 3643 | AGAUCAUGCUGGACUGCUGGCAC | AGAUCAUGCUGGACUGCUGGCAC | 2242 |
| mFLT1 | 3420 | AaAUCAUGUUGGAUUGCUGGCAC | AAAUCAUGUUGGAUUGCUGGCAC | 2243 |
| mKDR | 3613 | AGACCAUGCUGGACUGCUGGCAU | AGACCAUGCUGGACUGCUGGCAU | 2244 |
| rFLT1 | 3630 | AaAUCAUGCUGGAUUGCUGGCAC | AAAUCAUGCUGGAUUGCUGGCAC | 2245 |
| rKDR | 3648 | ABACCAUGCUGGAUUGCUGGCAU | AAACCAUGCUGGAUUGCUGGCAU | 2246 |
| hKDR | 3716 | GACCAUGCUGGACUGCUGGCACG | GACCAUGCUGGACUGCUGGCACG | 2247 |
| hFLT1 | 3644 | GAUCAUGCUGGACUGCUGGCACa | GAUCAUGCUGGACUGCUGGCACA | 2248 |
| mfLT1 | 3421 | aAUCAUGUUGGAUUGCUGGCACa | AAUCAUGUUGGAUUGCUGGCACA | 2249 |
| mKDR | 3614 | GACCAUGCUGGACUGCUGGCAUG | GACCAUGCUGGACUGCUGGCAUG | 2250 |
| rFLT1 | 3631 | aAUCAUGCUGGAUUGCUGGCACa | AAUCAUGCUGGAUUGCUGGCACA | 2251 |
| rKDR | 3649 | aACCAUGCUGGAUUGCUGGCAUG | AACCAUGCUGGAUUGCUGGCAUG | 2252 |
| hKDR | 3811 | AGCAGGAUGGCAAAGACUACAUU | AGCAGGAUGGCAAAGACUACAUU | 2253 |
| hFLT1 | 3739 | AaCAGGAUGGUAAAGACUACAUc | AACAGGAUGGUAAAGACUACAUC | 2254 |
| mFLT1 | 3516 | AaCAGGAUGGgAAAGAUUACAUc | AACAGGAUGGGAAAGAUUACAUC | 2255 |
| mKDR | 3709 | AGCAGGAUGGCAAAGACUAUAUU | AGCAGGAUGGCAAAGACUAUAUU | 2256 |
| rFLT1 | 3726 | AaCAGGAUGGUAAAGACUACAUc | AACAGGAUGGUAAAGACUACAUC | 2254 |
| rKDR | 3744 | AGCAGGAUGGCAAAGACUAUAUU | AGCAGGAUGGCAAAGACUAUAUU | 2256 |
| hKDR | 3812 | GCAGGAUGGCAAAGACUACAUUG | GCAGGAUGGCAAAGACUACAUUG | 2257 |
| hFLT1 | 3740 | aCAGGAUGGUAAAGACUACAUcc | ACAGGAUGGUAAAGACUACAUCC | 2258 |
| mFLT1 | 3517 | aCAGGAUGGgAAAGAUUACAUcc | ACAGGAUGGGAAAGAUUACAUCC | 2259 |
| mKDR | 3710 | GCAGGAUGGCAAAGACUAUAUUG | GCAGGAUGGCAAAGACUAUAUUG | 2260 |
| rFLT1 | 3727 | aCAGGAUGGUAAAGACUACAUcc | ACAGGAUGGUAAAGACUACAUCC | 2258 |
| rKDR | 3745 | GCAGGAUGGCAAAGACUAUAUUG | GCAGGAUGGCAAAGACUAUAUUG | 2260 |

Conserved Regions

[0623] Fragments of >=10 nt that are present in both human VEGF (NM_{—}003376.3) and human FLT1 (NM_{—}002019.1)

| | | | | |
|---|---|---|---|---|
| Gene | Pos | Len | Sequence | Seq ID |

| | | | | |
|---|---|---|---|---|
| FLT1 | 18 | 12 | CUCCUCCCCGGC | 2261 |
| FLT1 | 125 | 12 | GGAGCCGCGAGA | 2262 |
| FLT1 | 155 | 12 | GGCCGGCGGCGG | 2263 |
| FLT1 | 160 | 10 | GCGGCGGCGA | 2264 |
| FLT1 | 1051 | 11 | UACCCUGAUGA | 2265 |
| FLT1 | 1803 | 10 | GGCUAGCACC | 2266 |
| FLT1 | 2841 | 10 | AGAGGGGGCC | 2267 |
| FLT1 | 3133 | 12 | AGCAGCGAAAGC | 2268 |
| FLT1 | 3191 | 11 | AGGAAGAGGAG | 2269 |
| FLT1 | 3550 | 10 | CCAGGAGUAC | 2270 |
| FLT1 | 4216 | 10 | CCGCCCCCAG | 2271 |
| FLT1 | 5711 | 10 | GUGGGCCUUG | 2272 |
| FLT1 | 5811 | 10 | GUGGGCCUUG | 2272 |
| FLT1 | 5938 | 10 | CUUGGGGAGA | 2273 |
| FLT1 | 6236 | 10 | CCUCUUCUUU | 2274 |

[0624] Fragments of >=10 nt that are present in both human VEGF (NM_{—}003376.3) and human KDR (NM_{—}002153.1)

| | | | | |
|---|---|---|---|---|
| Gene | Pos | Len | Sequence | Seq ID |

| | | | | |
|---|---|---|---|---|
| KDR | 1463 | 10 | AAGUGAGUGA | 2275 |
| KDR | 1689 | 11 | GGAGGAAGAGU | 2276 |
| KDR | 1886 | 11 | ACAAAUGUGAA | 2277 |
| KDR | 1983 | 10 | GCCCACUGAG | 2278 |
| KDR | 2228 | 10 | GCCUUGCUCA | 2279 |
| KDR | 2484 | 10 | GAGGAAGGAG | 2280 |
| KDR | 3064 | 10 | UUUGGAAACC | 2281 |
| KDR | 3912 | 11 | GGAGGAGGAAG | 2282 |
| KDR | 4076 | 10 | CGGACAGUGG | 2283 |
| KDR | 5138 | 10 | UCCCAGGCUG | 2284 |

The 3′-ends of the Upper sequence and the Lower sequence of the siNA construct can include an overhang sequence, for example about 1, 2, 3, or 4 nucleotides in length, preferably 2 nucleotides in length, wherein the overhanging sequence of the lower sequence is optionally complementary to a portion of the target sequence.
The upper and lower sequences in the Table can further comprise a chemical modification having Formulae I-VII, such as exemplary siNA constructs shown in FIGS. 4 and 5, or having modifications described in Table IV or any combination thereof.

[0625] TABLE III
VEGF and/or VEGFR Synthetic Modified siNA Constructs

VEGFR1

| | | | |
|---|---|---|---|
| Target | Seq | Cmpd | Seq |

| | | | | | | |
|---|---|---|---|---|---|---|
| Pos | Target | ID | # | Aliases | Sequence | ID |

| | | | | | | |
|---|---|---|---|---|---|---|
| 298 | GCUGUCUGCUUCUCACAGGAUCU | 2285 | | FLT1:298U21 sense siNA | UGUCUGCUUCUCACAGGAUTT | 2709 |
| 1956 | GAAGGAGAGGACCUGAAACUGUC | 2286 | | FLT1:1956U21 sense siNA | AGGAGAGGACCUGAAACUGU | 2710 |
| 1957 | AAGGAGAGGACCUGAAACUGUCU | 2287 | | FLT1:1957U21 sense siNA | GGAGAGGACCUGAAACUGUTT | 2711 |
| 2787 | GCAUUUGGCAUUAAGAAAUCACC | 2288 | | FLT1:2787U21 sense siNA | AUUUGGCAUUAAGAAAUCATT | 2712 |
| 298 | GCUGUCUGCUUCUCACAGGAUCU | 2285 | | FLT1:316L21 antisense | AUCCUGUGAGAAGCAGACATT | 2713 |
| | | | | siNA (298C) | | |
| 1956 | GAAGGAGAGGACCUGAAACUGUC | 2286 | | FLT1:1974L21 antisense | CAGUUUCAGGUCCUCUCCUTT | 2714 |
| | | | | siNA (1956C) | | |
| 1957 | AAGGAGAGGACCUGAAACUGUCU | 2287 | | FLT1:1975L21 antisense | ACAGUUUCAGGUCCUCUCCTT | 2715 |
| | | | | siNA (1957C) | | |
| 2787 | GCAUUUGGCAUUAAGAAAUCACC | 2288 | | FLT1:2805L21 antisense | UGAUUUCUUAAUGCCAAAUTT | 2716 |
| | | | | siNA (2787C) | | |
| 298 | GCUGUCUGCUUCUCACAGGAUCU | 2285 | | FLT1:298U21 sense | B uGucuGcuucucAcAGGAuTT B | 2717 |
| | | | | siNA stab04 | | |
| 1956 | GAAGGAGAGGACCUGAAACUGUC | 2286 | | FLT1:1956U21 sense | B AGGAGAGGAccuGAAAcuGTT B | 2718 |
| | | | | siNA stab04 | | |
| 1957 | AAGGAGAGGACCUGAAACUGUCU | 2287 | | FLT1:1957U21 sense | B GGAGAGGAccuGAAAcuGuTT B | 2719 |
| | | | | siNA stab04 | | |
| 2787 | GCAUUUGGCAUUAAGAAAUCACC | 2288 | | FLT1:2787U21 sense | B AuuuGGcAuuAAGAAAucATT B | 2720 |
| | | | | siNA stab04 | | |
| 298 | GCUGUCUGCUUCUCACAGGAUCU | 2285 | | FLT1:316L21 anti- | AuccuGuGAGAAGcAGAcATsT | 2721 |
| | | | | sense siNA (298C) | | |
| | | | | stab05 | | |
| 1956 | GAAGGAGAGGACCUGAAACUGUC | 2286 | | FLT1:1974L21 anti- | cAGuuucAGGuccucuccuTsT | 2722 |
| | | | | sense siNA (1956C) | | |
| | | | | stab05 | | |
| 1957 | AAGGAGAGGACCUGAAACUGUCU | 2287 | | FLT1:1975L21 anti- | AcAGuuucAGGuccucuccTsT | 2723 |
| | | | | sense siNA (1957C) | | |
| | | | | stab05 | | |
| 2787 | GCAUUUGGCAUUAAGAAAUCACC | 2288 | | FLT1:2805L21 anti- | uGAuuucuuAAuGccAAAuTsT | 2724 |
| | | | | sense siNA (2787C) | | |
| | | | | stab05 | | |
| 298 | GCUGUCUGCUUCUCACAGGAUCU | 2285 | | FLT1:298U21 sense | B uGucuGcuucucAcAGGAuTT B | 2725 |
| | | | | siNA stab07 | | |
| 1956 | GAAGGAGAGGACCUGAAACUGUC | 2286 | 37387 | FLT1:1956U21 sense | B AGGAGAGGAccuGAAAcuGTT B | 2726 |
| | | | | siNA stab07 | | |
| 1957 | AAGGAGAGGACCUGAAACUGUCU | 2287 | 37388 | FLT1:1957U21 sense | B GGAGAGGAccuGAAAcuGuTT B | 2727 |
| | | | | siNA stab07 | | |
| 2787 | GCAUUUGGCAUUAAGAAAUCACC | 2288 | 37404 | FLT1:2787U21 sense | B AuuuGGcAuuAAGAAAucATT B | 2728 |
| | | | | siNA stab07 | | |
| 298 | GCUGUCUGCUUCUCACAGGAUCU | 2285 | | FLT1:316L21 anti- | AuccuGuGAGAAGcAGAcATsT | 2729 |
| | | | | sense siNA (298C) | | |
| | | | | stab11 | | |
| 1956 | GAAGGAGAGGACCUGAAACUGUC | 2286 | | FLT1:1974L21 anti- | cAGuuucAGGuccucuccuTsT | 2730 |
| | | | | sense siNA (1956C) | | |
| | | | | stab11 | | |
| 1957 | AAGGAGAGGACCUGAAACUGUCU | 2287 | | FLT1:1975L21 anti- | AcAGuuucAGGuccucuccTsT | 2731 |
| | | | | sense siNA (1957C) | | |
| | | | | stab11 | | |
| 2787 | GCAUUUGGCAUUAAGAAAUCACC | 2288 | | FLT1:2805L21 anti- | uGAuuucuuAAuGccAAAuTsT | 2732 |
| | | | | sense siNA (2787C) | | |
| | | | | stab11 | | |
| 349 | AACUGAGUUUAAAAGGCACCCAG | 2289 | 31209 | FLT1:367L21 anti- | GAcucAAAuuuuccGuGGGTsT | 2733 |
| | | | | sense siNA (349C) | | |
| | | | | stab05 inv | | |
| 2949 | AAGCAAGGAGGGCCUCUGAUGGU | 2290 | 31210 | FLT1:2967L21 anti- | cGuuccucccGGAGAcuAcTsT | 2734 |
| | | | | sense siNA (2949C) | | |
| | | | | stab05 inv | | |
| 3912 | AGCCUGGAAAGAAUCAAAACCUU | 2291 | 31211 | FLT1:3930L21 anti- | GGAccuuucuuAGuuuuGGTsT | 2735 |
| | | | | sense siNA (3912C) | | |
| | | | | stab05 inv | | |
| 349 | AACUGAGUUUAAAAGGCACCCAG | 2289 | 31212 | FLT1:349U21 sense | B cccAcGGAAAAuuuGAGucTT B | 2736 |
| | | | | siNA stab07 inv | | |
| 2949 | AAGCAAGGAGGGCCUCUGAUGGU | 2290 | 31213 | FLT1:2949U21 sense | B GuAGucuccGGGAGGAAcGTT B | 2737 |
| | | | | siNA stab07 inv | | |
| 3912 | AGCCUGGAAAGAAUCAAAACCUU | 2291 | 31214 | FLT1:3912U21 sense | B ccAAAAcuAAGAAAGGuccTT B | 2738 |
| | | | | siNA stab07 inv | | |
| 349 | AACUGAGUUUAAAAGGCACCCAG | 2289 | 31215 | FLT1:367L21 anti- | GAcucAAAuuuuccGuGGGTsT | 2739 |
| | | | | sense siNA (349C) | | |
| | | | | stab08 inv | | |
| 2949 | AAGCAAGGAGGGCCUCUGAUGGU | 2290 | 31216 | FLT1:2967L21 anti- | cGuuccucccGGAGAcuAcTsT | 2740 |
| | | | | sense siNA (2949C) | | |
| | | | | stab08 inv | | |
| 3912 | AGCCUGGAAAGAAUCAAAACCUU | 2291 | 31217 | FLT1:3930L21 anti- | GGAccuuucuuAGuuuuGGTsT | 2741 |
| | | | | sense siNA (3912C) | | |
| | | | | stab08 inv | | |
| 349 | AACUGAGUUUAAAAGGCACCCAG | 2289 | 31270 | FLT1:349U21 sense | B CUGAGUUUAAAAGGCACCCTT B | 2742 |
| | | | | siNA stab09 | | |
| 2949 | AAGCAAGGAGGGCCUCUGAUGGU | 2290 | 31271 | FLT1:2949U21 sense | B GCAAGGAGGGCCUCUGAUGTT B | 2743 |
| | | | | siNA stab09 | | |
| 3912 | AGCCUGGAAAGAAUCAAAACCUU | 2291 | 31272 | FLT1:3912U21 sense | B CCUGGAAAGAAUCAAAACCTT B | 2744 |
| | | | | siNA stab09 | | |
| 349 | AACUGAGUUUAAAAGGCACCCAG | 2289 | 31273 | FLT1:367L21 anti- | GGGUGCCUUUUAAACUCAGTsT | 2745 |
| | | | | sense siNA (349C) | | |
| | | | | stab10 | | |
| 2949 | AAGCAAGGAGGGCCUCUGAUGGU | 2290 | 31274 | FLT1:2967L21 anti- | CAUCAGAGGCCCUCCUUGCTsT | 2746 |
| | | | | sense siNA (2949C) | | |
| | | | | stab10 | | |
| 3912 | AGCCUGGAAAGAAUCAAAACCUU | 2291 | 31275 | FLT1:3930L21 anti- | GGUUUUGAUUCUUUCCAGGTsT | 2747 |
| | | | | sense siNA (3912C) | | |
| | | | | stab10 | | |
| 349 | AACUGAGUUUAAAAGGCACCCAG | 2289 | 31276 | FLT1:349U21 sense | B CCCACGGAAAAUUUGAGUCTT B | 2748 |
| | | | | siNA stab09 inv | | |
| 2949 | AAGCAAGGAGGGCCUCUGAUGGU | 2290 | 31277 | FLT1:2949U21 sense | B GUAGUCUCCGGGAGGAACGTT B | 2749 |
| | | | | siNA stab09 inv | | |
| 3912 | AGCCUGGAAAGAAUCAAAACCUU | 2291 | 31278 | FLT1:3912U21 sense | B CCAAAACUAAGAAAGGUCCTT B | 2750 |
| | | | | siNA stab09 inv | | |
| 349 | AACUGAGUUUAAAAGGCACCCAG | 2289 | 31279 | FLT1:367L21 anti- | GACUCAAAUUUUCCGUGGGTsT | 2751 |
| | | | | sense siNA (349C) | | |
| | | | | stab10 inv | | |
| 2949 | AAGCAAGGAGGGCCUCUGAUGGU | 2290 | 31280 | FLT1:2967L21 anti- | CGUUCCUCCCGGAGACUACTsT | 2752 |
| | | | | sense siNA (2949C) | | |
| | | | | stab10 inv | | |
| 3912 | AGCCUGGAAAGAAUCAAAACCUU | 2291 | 31281 | FLT1:3930L21 anti- | GGACCUUUCUUAGUUUUGGTsT | 2753 |
| | | | | sense siNA (3912C) | | |
| | | | | stab10 inv | | |
| 2340 | AACAACCACAAAAUACAACAAGA | 2292 | 31424 | FLT1:2358L21 anti- | uuGuuGuAuuuuGuGGuuGXsX | 2754 |
| | | | | sense siNA (2340C) | | |
| | | | | stab11 3′-BrdU | | |
| 2949 | AAGCAAGGAGGGCCUCUGAUGGU | 2290 | 31425 | FLT1:2967L21 anti- | cAucAGAGGcccuccuuGcXsX | 2755 |
| | | | | sense siNA (2949C) | | |
| | | | | stab11 3′-BrdU | | |
| 2340 | AACAACCACAAAAUACAACAAGA | 2292 | 31442 | FLT1:2358L21 anti- | uuGuuGuAuuuuGuGGuuGXsT | 2756 |
| | | | | sense siNA (2340C) | | |
| | | | | stab11 3′-BrdU | | |
| 2949 | AAGCAAGGAGGGCCUCUGAUGGU | 2290 | 31443 | FLT1:2967L21 anti- | cAucAGAGGcccuccuuGcXsT | 2757 |
| | | | | sense siNA (2949C) | | |
| | | | | stab11 3′-BrdU | | |
| 2340 | AACAACCACAAAAUACAACAAGA | 2292 | 31449 | FLT1:2340U21 sense | B CAACCACAAAAUACAACAATT B | 2758 |
| | | | | siNA stab09 | | |
| 2340 | AACAACCACAAAAUACAACAAGA | 2292 | 31450 | FLT1:2340U21 sense | B AACAACAUAAAACACCAACTT B | 2759 |
| | | | | siNA inv stab09 | | |
| 2340 | AACAACCACAAAAUACAACAAGA | 2292 | 31451 | FLT1:2358L21 anti- | UUGUUGUAUUUUGUGGUUGTsT | 2760 |
| | | | | sense siNA (2340C) | | |
| | | | | stab10 | | |
| 2340 | AACAACCACAAAAUACAACAAGA | 2292 | 31452 | FLT1:2358L21 anti- | GUUGGUGUUUUAUGUUGUUTsT | 2761 |
| | | | | sense siNA (2340C) inv | | |
| | | | | stab10 | | |
| 2340 | AACAACCACAAAAUACAACAAGA | 2292 | 31509 | FLT1:2358L21 anti- | uuGuuGuAuuuuGuGGuuGTsT | 2762 |
| | | | | sense siNA (2340C) | | |
| | | | | stab11 | | |
| 349 | AACUGAGUUUAAAAGGCACCCAG | 2289 | 31794 | 2x cholesterol + | (H)2 ZTa | 2763 |
| | | | | R31194 FLT1:349U21 | B cuGAGuuuAAAAGGcAcccTT B | |
| | | | | sense siNA stab07 | | |
| 349 | AACUGAGUUUAAAAGGCACCCAG | 2289 | 31795 | 2x cholesterol + | (H)2 ZTa | 2764 |
| | | | | R31212 FLT1:349U21 | B cccAcGGAAAAuuuGAGucTT B | |
| | | | | sense siNA stab07 inv | | |
| 349 | AACUGAGUUUAAAAGGCACCCAG | 2289 | 31796 | 2x cholesterol + | (H)2 ZTA | 2765 |
| | | | | R31270 FLT1:349U21 | B CUGAGUUUAAAAGGCACCCTT B | |
| | | | | sense siNA stab09 | | |
| 349 | AACUGAGUUUAAAAGGCACCCAG | 2289 | 31797 | 2x cholesterol + | (H)2 ZTA | 2766 |
| | | | | R31276 FLT1:349U21 | B CCCACGGAAAAUUUGAGUCTT B | |
| | | | | sense siNA stab09 inv | | |
| 349 | AACUGAGUUUAAAAGGCACCCAG | 2289 | 31798 | 2x C18 phospholipid + | (L)2 ZTa | 2767 |
| | | | | R31194 FLT1:349U21 | B cuGAGuuuAAAAGGcAcccTT B | |
| | | | | sense siNA stab07 | | |
| 349 | AACUGAGUUUAAAAGGCACCCAG | 2289 | 31799 | 2x C18 phospholipid + | (L)2 ZTa | 2768 |
| | | | | R31212 FLT1:349U21 | B cccAcGGAAAAuuuGAGucTT B | |
| | | | | sense siNA stab07 inv | | |
| 349 | AACUGAGUUUAAAAGGCACCCAG | 2289 | 31800 | 2x C18 phospholipid + | (L)2 ZTA | 2769 |
| | | | | R31270 | B CUGAGUUUAAAAGGCACCCTT B | |
| | | | | FLT1:349U21 | | |
| | | | | sense siNA stab09 | | |
| 349 | AACUGAGUUUAAAAGGCACCCAG | 2289 | 31801 | 2x C18 phospholipid + | (L)2 ZTA | 2770 |
| | | | | R31276 FLT1:349U21 | B CCCACGGAAAAUUUGAGUCTT B | |
| | | | | sense siNA stab09 inv | | |
| 3645 | CAUGCUGGACUGCUGGCAC | 2293 | 32235 | FLT1:3645U21 sense | CAUGCUGGACUGCUGGCACTT | 2771 |
| | | | | siNA | | |
| 3646 | AUGCUGGACUGCUGGCACA | 2294 | 32236 | FLT1:3646U21 sense | AUGCUGGACUGCUGGCACATT | 2772 |
| | | | | siNA | | |
| 3647 | UGCUGGACUGCUGGCACAG | 2295 | 32237 | FLT1:3647U21 sense | UGCUGGACUGCUGGCACAGTT | 2773 |
| | | | | siNA | | |
| 3645 | CAUGCUGGACUGCUGGCAC | 2293 | 32250 | FLT1:3663L21 anti- | GUGCCAGCAGUCCAGCAUGTT | 2774 |
| | | | | sense siNA (3645C) | | |
| 3646 | AUGCUGGACUGCUGGCACA | 2294 | 32251 | FLT1:3664L21 anti- | UGUGCCAGCAGUCCAGCAUTT | 2775 |
| | | | | sense siNA (3646C) | | |
| 3647 | UGCUGGACUGCUGGCACAG | 2295 | 32252 | FLT1:3665L21 anti- | CUGUGCCAGCAGUCCAGCATT | 2776 |
| | | | | sense siNA (3647C) | | |
| 349 | AACUGAGUUUAAAAGGCACCCAG | 2289 | 32278 | FLT1:349U21 sense | B CUGAGUUUAAAAGGCACCCTT B | 2777 |
| | | | | siNA stab16 | | |
| 349 | AACUGAGUUUAAAAGGCACCCAG | 2289 | 32279 | FLT1:349U21 sense | B cuGAGuuuAAAAGGcAcccTT B | 2778 |
| | | | | siNA stab18 | | |
| 349 | AACUGAGUUUAAAAGGCACCCAG | 2289 | 32280 | FLT1:349U21 sense | B CCCACGGAAAAUUUGAGUCTT B | 2779 |
| | | | | siNA inv stab16 | | |
| 349 | AACUGAGUUUAAAAGGCACCCAG | 2289 | 32281 | FLT1:349U21 sense | B CccAcGGAAAAuuuGAGucTT B | 2780 |
| | | | | siNA inv stab18 | | |
| 346 | CUGAACUGAGUUUAAAAGGCACC | 2296 | 32282 | FLT1:346U21 sense | B GAACUGAGUUUAAAAGGCATT B | 2781 |
| | | | | siNA stab09 | | |
| 347 | UGAACUGAGUUUAAAAGGCACCC | 2297 | 32283 | FLT1:347U21 sense | B AACUGAGUUUAAAAGGCACTT B | 2782 |
| | | | | siNA stab09 | | |
| 348 | GAACUGAGUUUAAAAGGCACCCA | 2298 | 32284 | FLT1:348U21 sense | B ACUGAGUUUAAAAGGCACCTT B | 2783 |
| | | | | siNA stab09 | | |
| 350 | ACUGAGUUUAAAAGGCACCCAGC | 2299 | 32285 | FLT1:350U21 sense | B UGAGUUUAAAAGGCACCCATT B | 2784 |
| | | | | siNA stab09 | | |
| 351 | CUGAGUUUAAAAGGCACCCAGCA | 2300 | 32286 | FLT1:351U21 sense | B GAGUUUAAAAGGCACCCAGTT B | 2785 |
| | | | | siNA stab09 | | |
| 352 | UGAGUUUAAAAGGCACCCAGCAC | 2301 | 32287 | FLT1:352U21 sense | B AGUUUAAAAGGCACCCAGCTT B | 2786 |
| | | | | siNA stab09 | | |
| 353 | GAGUUUAAAAGGCACCCAGCACA | 2302 | 32288 | FLT1:353U21 sense | B GUUUAAAAGGCACCCAGCATT B | 2787 |
| | | | | siNA stab09 | | |
| 346 | CUGAACUGAGUUUAAAAGGCACC | 2296 | 32289 | FLT1:364121 anti- | UGCCUUUUAAACUCAGUUCTsT | 2788 |
| | | | | sense siNA (346C) | | |
| | | | | stab10 | | |
| 347 | UGAACUGAGUUUAAAAGGCACCC | 2297 | 32290 | FLT1:365121 anti- | GUGCCUUUUAAACUCAGUUTsT | 2789 |
| | | | | sense siNA (347C) | | |
| | | | | stab10 | | |
| 348 | GAACUGAGUUUAAAAGGCACCCA | 2298 | 32291 | FLT1:366L21 anti- | GGUGCCUUUUAAACUCAGUTsT | 2790 |
| | | | | sense siNA (348C) | | |
| | | | | stab10 | | |
| 350 | ACUGAGUUUAAAAGGCACCCAGC | 2299 | 32292 | FLT1:368121 anti- | UGGGUGCCUUUUAAACUCATsT | 2791 |
| | | | | sense siNA (350C) | | |
| | | | | stab10 | | |
| 351 | CUGAGUUUAAAAGGCACCCAGCA | 2300 | 32293 | FLT1:369L21 anti- | CUGGGUGCCUUUUAAACUCTsT | 2792 |
| | | | | sense siNA (351C) | | |
| | | | | stab10 | | |
| 352 | UGAGUUUAAAAGGCACCCAGCAC | 2301 | 32294 | FLT1:370L21 anti- | GCUGGGUGCCUUUUAAACUTsT | 2793 |
| | | | | sense siNA (352C) | | |
| | | | | stab10 | | |
| 353 | GAGUUUAAAAGGCACCCAGCACA | 2302 | 32295 | FLT1:371L21 anti- | UGCUGGGUGCCUUUUAAACTsT | 2794 |
| | | | | sense siNA (353C) | | |
| | | | | stab10 | | |
| 346 | CUGAACUGAGUUUAAAAGGCACC | 2296 | 32296 | FLT1:346U21 sense | B ACGGAAAAUUUGAGUCAAGTT B | 2795 |
| | | | | siNA inv stab09 | | |
| 347 | UGAACUGAGUUUAAAAGGCACCC | 2297 | 32297 | FLT1:347U21 sense | B CACGGAAAAUUUGAGUCAATT B | 2796 |
| | | | | siNA inv stab09 | | |
| 348 | GAACUGAGUUUAAAAGGCACCCA | 2298 | 32298 | FLT1:348U21 sense | B CCACGGAAAAUUUGAGUCATT B | 2797 |
| | | | | siNA inv stab09 | | |
| 350 | ACUGAGUUUAAAAGGCACCCAGC | 2299 | 32299 | FLT1:350U21 sense | B ACCCACGGAAAAUUUGAGUTT B | 2798 |
| | | | | siNA inv stab09 | | |
| 351 | CUGAGUUUAAAAGGCACCCAGCA | 2300 | 32300 | FLT1:351U21 sense | B GACCCACGGAAAAUUUGAGTT B | 2799 |
| | | | | siNA inv stab09 | | |
| 352 | UGAGUUUAAAAGGCACCCAGCAC | 2301 | 32301 | FLT1:352U21 sense | B CGACCCACGGAAAAUUUGATT B | 2800 |
| | | | | siNA inv stab09 | | |
| 353 | GAGUUUAAAAGGCACCCAGCACA | 2302 | 32302 | FLT1:353U21 sense | B ACGACCCACGGAAAAUUUGTT B | 2801 |
| | | | | siNA inv stab09 | | |
| 346 | CUGAACUGAGUUUAAAAGGCACC | 2296 | 32303 | FLT1:364121 anti- | CUUGACUCAAAUUUUCCGUTsT | 2802 |
| | | | | sense siNA (346C) inv | | |
| | | | | stab10 | | |
| 347 | UGAACUGAGUUUAAAAGGCACCC | 2297 | 32304 | FLT1:365121 anti- | UUGACUCAAAUUUUCCGUGTsT | 2803 |
| | | | | sense siNA (347C) inv | | |
| | | | | stab10 | | |
| 348 | GAACUGAGUUUAAAAGGCACCCA | 2298 | 32305 | FLT1:366L21 anti- | UGACUCAAAUUUUCCGUGGTsT | 2804 |
| | | | | sense siNA (348C) inv | | |
| | | | | stab10 | | |
| 350 | ACUGAGUUUAAAAGGCACCCAGC | 2299 | 32306 | FLT1:368L21 anti- | ACUCAAAUUUUCCGUGGGUTsT | 2805 |
| | | | | sense siNA (350C) inv | | |
| | | | | stab10 | | |
| 351 | CUGAGUUUAAAAGGCACCCAGCA | 2300 | 32307 | FLT1:369L21 anti- | CUCAAAUUUUCCGUGGGUCTsT | 2806 |
| | | | | sense siNA (351C) inv | | |
| | | | | stab10 | | |
| 352 | UGAGUUUAAAAGGCACCCAGCAC | 2301 | 32308 | FLT1:370L21 anti- | UCAAAUUUUCCGUGGGUCGTsT | 2807 |
| | | | | sense siNA (352C) inv | | |
| | | | | stab10 | | |
| 353 | GAGUUUAAAAGGCACCCAGCACA | 2302 | 32309 | FLT1:371L21 anti- | CAAAUUUUCCGUGGGUCGUTsT | 2808 |
| | | | | sense siNA (353C) inv | | |
| | | | | stab10 | | |
| 349 | AACUGAGUUUAAAAGGCACCCAG | 2289 | 32338 | FLT1:367L21 anti- | GGGUGCCUUUUAAACUCAGXsT | 2809 |
| | | | | sense siNA (349C) | | |
| | | | | stab10 3′-BrdU | | |
| 349 | AACUGAGUUUAAAAGGCACCCAG | 2289 | 32718 | FLT1:367L21 anti- | pGGGUGCCUUUUAAACUCGAGUUUAAAAG B | 2810 |
| | | | | sense siNA (349C) v1 | | |
| | | | | 5′p | | |
| 349 | AACUGAGUUUAAAAGGCACCCAG | 2289 | 32719 | FLT1:367L21 anti- | pGGGUGCCUUUUAAACUCAGGAGUUUAAAAG B | 2811 |
| | | | | sense siNA (349C) v2 | | |
| | | | | 5′p | | |
| 2967 | AAGCAAGGAGGGCCUCUGAUGGU | 2290 | 32720 | FLT1:2967L21 anti- | pCAUCAGAGGCCCUCCUUGCAAGGAGGGCC | 2812 |
| | | | | sense siNA (2949C) | UCU B | |
| | | | | v1 5′p | | |
| 2967 | AAGCAAGGAGGGCCUCUGAUGGU | 2290 | 32721 | FLT1:2967L21 anti- | pCAUCAGAGGCCCUCCUUAAGGAGGGCCU | 2813 |
| | | | | sense siNA (2949C) | CUG B | |
| | | | | v2 5′p | | |
| 2967 | AAGCAAGGAGGGCCUCUGAUGGU | 2290 | 32722 | FLT1:2967L21 anti- | pCAUCAGAGGCCCUCCUAGGAGGGCCUCUG B | 2814 |
| | | | | sense siNA (2949C) | | |
| | | | | v3 5′p | | |
| 346 | CUGAACUGAGUUUAAAAGGCACC | 2296 | 32748 | FLT1:346U21 sense | B GAAcuGAGuuuAAAAGGcATT B | 2815 |
| | | | | siNA stab07 | | |
| 347 | UGAACUGAGUUUAAAAGGCACCC | 2297 | 32749 | FLT1:347U21 sense | B AAcuGAGuuuAAAAGGcAcTT B | 2816 |
| | | | | siNA stab07 | | |
| 348 | GAACUGAGUUUAAAAGGCACCCA | 2298 | 32750 | FLT1:348U21 sense | B AcuGAGuuuAAAAGGcAccTT B | 2817 |
| | | | | siNA stab07 | | |
| 350 | ACUGAGUUUAAAAGGCACCCAGC | 2299 | 32751 | FLT1:350U21 sense | B uGAGuuuAAAAGGcAcccATT B | 2818 |
| | | | | siNA stab07 | | |
| 351 | CUGAGUUUAAAAGGCACCCAGCA | 2300 | 32752 | FLT1:351U21 sense | B GAGuuuAAAAGGcAcccAGTT B | 2819 |
| | | | | siNA stab07 | | |
| 352 | UGAGUUUAAAAGGCACCCAGCAC | 2301 | 32753 | FLT1:352U21 sense | B AGuuuAAAAGGcAcccAGcTT B | 2820 |
| | | | | siNA stab07 | | |
| 353 | GAGUUUAAAAGGCACCCAGCACA | 2302 | 32754 | FLT1:353U21 sense | B GuuuAAAAGGcAcccAGcATT B | 2821 |
| | | | | siNA stab07 | | |
| 346 | CUGAACUGAGUUUAAAAGGCACC | 2296 | 32755 | FLT1:364L21 anti- | uGccuuuuAAAcucAGuucTsT | 2822 |
| | | | | sense siNA (346C) | | |
| | | | | stab08 | | |
| 347 | UGAACUGAGUUUAAAAGGCACCC | 2297 | 32756 | FLT1:365L21 anti- | GuGccuuuuAAAcucAGuuTsT | 2823 |
| | | | | sense siNA (347C) | | |
| | | | | stab08 | | |
| 348 | GAACUGAGUUUAAAAGGCACCCA | 2298 | 32757 | FLT1:366L21 anti- | GGuGccuuuuAAAcucAGuTsT | 2824 |
| | | | | sense siNA (348C) | | |
| | | | | stab08 | | |
| 350 | ACUGAGUUUAAAAGGCACCCAGC | 2299 | 32758 | FLT1:368L21 anti- | uGGGuGccuuuuAAAcucATsT | 2825 |
| | | | | sense siNA (350C) | | |
| | | | | stab08 | | |
| 351 | CUGAGUUUAAAAGGCACCCAGCA | 2300 | 32759 | FLT1:369L21 anti- | cuGGGuGccuuuuAAAcucTsT | 2826 |
| | | | | sense siNA (351C) | | |
| | | | | stab08 | | |
| 352 | UGAGUUUAAAAGGCACCCAGCAC | 2301 | 32760 | FLT1:370L21 anti- | GcuGGGuGccuuuuAAAcuTsT | 2827 |
| | | | | sense siNA (352C) | | |
| | | | | stab08 | | |
| 353 | GAGUUUAAAAGGCACCCAGCACA | 2302 | 32761 | FLT1:371L21 antisense | uGcuGGGuGccuuuuAAAcTsT | 2828 |
| | | | | siNA (353C) stab08 | | |
| 346 | CUGAACUGAGUUUAAAAGGCACC | 2296 | 32772 | FLT1:346U21 sense | B AcGGAAAAuuuGAGucAAGTT B | 2829 |
| | | | | siNA inv stab07 | | |
| 347 | UGAACUGAGUUUAAAAGGCACCC | 2297 | 32773 | FLT1:347U21 sense | B cAcGGAAAAuuuGAGucAATT B | 2830 |
| | | | | siNA inv stab07 | | |
| 348 | GAACUGAGUUUAAAAGGCACCCA | 2298 | 32774 | FLT1:348U21 sense | B ccAcGGAAAAuuuGAGucATT B | 2831 |
| | | | | siNA inv stab07 | | |
| 350 | ACUGAGUUUAAAAGGCACCCAGC | 2299 | 32775 | FLT1:350U21 sense | B AcccAcGGAAAAuuuGAGuTT B | 2832 |
| | | | | siNA inv stab07 | | |
| 351 | CUGAGUUUAAAAGGCACCCAGCA | 2300 | 32776 | FLT1:351U21 sense | B GAcccAcGGAAAAuuuGAGTT B | 2833 |
| | | | | siNA inv stab07 | | |
| 352 | UGAGUUUAAAAGGCACCCAGCAC | 2301 | 32777 | FLT1:352U21 sense | B cGAcccAcGGAAAAuuuGATT B | 2834 |
| | | | | siNA inv stab07 | | |
| 353 | GAGUUUAPAAGGCACCCAGCACA | 2302 | 32778 | FLT1:353U21 sense | B AcGAcccAcGGAAAAuuuGTT B | 2835 |
| | | | | siNA inv stab07 | | |
| 346 | CUGAACUGAGUUUAAAAGGCACC | 2296 | 32779 | FLT1:364L21 anti- | cuuGAcucAAAuuuuccGuTsT | 2836 |
| | | | | sense siNA (346C) inv | | |
| | | | | stab08 | | |
| 347 | UGAACUGAGUUUAAAAGGCACCC | 2297 | 32780 | FLT1:365121 anti- | uuGAcucAAAuuuuccGuGTsT | 2837 |
| | | | | sense siNA (347C) inv | | |
| | | | | stab08 | | |
| 348 | GAACUGAGUUUAAAAGGCACCCA | 2298 | 32781 | FLT1:366L21 anti- | uGAcucAAAuuuuccGuGGTsT | 2838 |
| | | | | sense siNA (348C) inv | | |
| | | | | stab08 | | |
| 350 | ACUGAGUUUAAAAGGCACCCAGC | 2299 | 32782 | FLT1:368121 anti- | AcucAAAuuuuccGuGGGuTsT | 2839 |
| | | | | sense siNA (350C) inv | | |
| | | | | stab08 | | |
| 351 | CUGAGUUUAAAAGGCACCCAGCA | 2300 | 32783 | FLT1:369L21 anti- | cucAAAuuuuccGuGGGucTsT | 2840 |
| | | | | sense siNA (351C) inv | | |
| | | | | stab08 | | |
| 352 | UGAGUUUAAAAGGCACCCAGCAC | 2301 | 32784 | FLT1:370121 anti- | ucAAAuuuuccGuGGGucGTsT | 2841 |
| | | | | sense siNA (352C) inv | | |
| | | | | stab08 | | |
| 353 | GAGUUUAAAAGGCACCCAGCACA | 2302 | 32785 | FLT1:371L21 anti- | cAAAuuuuccGuGGGucGuTsT | 2842 |
| | | | | sense siNA (353C) inv | | |
| | | | | stab08 | | |
| 349 | AACUGAGUUUAAAAGGCACCCAG | 2289 | 33121 | FLT1:349U21 sense | CUGAGUUUAAAAGGCACCCTT B | 2843 |
| | | | | siNA stab22 | | |
| 349 | AACUGAGUUUAAAAGGCACCCAG | 2289 | 33321 | FLT1:367L21 anti- | pGGGuGccuuuuAAAcucAGTsT | 2844 |
| | | | | sense siNA (349C) | | |
| | | | | stab08 +5′P | | |
| 349 | AACUGAGUUUAAAAGGCACCCAG | 2289 | 33338 | FLT1:367L21 anti- | L GGGuGccuuuuAAAcucAGTsT | 2845 |
| | | | | sense siNA (349C) | | |
| | | | | stab08 + 5′ aminoL | | |
| 349 | AACUGAGUUUAAAAGGCACCCAG | 2289 | 33553 | FLT1:367L21 anti- | L GGGuGccuuuuAAAcucAGTsT | 2846 |
| | | | | sense siNA (349C) | | |
| | | | | stab08 + 5′ aminoL | | |
| 349 | AACUGAGUUUAAAAGGCACCCAG | 2289 | 33571 | FLT1:367L21 anti- | IGGUGCCUUUUAAACUCAGTT | 2847 |
| | | | | sense siNA (349C) | | |
| | | | | stab10 + 5′I | | |
| 3645 | AUCAUGCUGGACUGCUGGCACAG | 2189 | 33725 | FLT1:3645U21 sense | B CAuGCuGGAcuGcuGGcAcTT B | 2848 |
| | | | | siNA stab07 | | |
| 3646 | UCAUGCUGGACUGCUGGCACAGA | 2195 | 33726 | FLT1:3646U21 sense | B AuGcuGGAcuGcuGGcAcATT B | 2849 |
| | | | | siNA stab07 | | |
| 3645 | AUCAUGCUGGACUGCUGGCACAG | 2189 | 33731 | FLT1:3663L21 anti- | GuGccAGcAGuccAGcAuGTsT | 2850 |
| | | | | sense siNA (3645C) | | |
| | | | | stab08 | | |
| 3646 | UCAUGCUGGACUGCUGGCACAGA | 2195 | 33732 | FLT1:3664L21 anti- | uGuGccAGcAGuccAGcAuTsT | 2851 |
| | | | | sense siNA (3646C) | | |
| | | | | stab08 | | |
| 3645 | AUCAUGCUGGACUGCUGGCACAG | 2189 | 33737 | FLT1:3645U21 sense | B CAUGCUGGACUGCUGGCACTT B | 2852 |
| | | | | siNA stab09 | | |
| 3646 | UCAUGCUGGACUGCUGGCACAGA | 2195 | 33738 | FLT1:3646U21 sense | B AUGCUGGACUGCUGGCACATT B | 2853 |
| | | | | siNA stab09 | | |
| 3645 | AUCAUGCUGGACUGCUGGCACAG | 2189 | 33743 | FLT1:3663L21 anti- | GUGCCAGCAGUCCAGCAUGTsT | 2854 |
| | | | | sense siNA (3645C) | | |
| | | | | stab10 | | |
| 3646 | UCAUGCUGGACUGCUGGCACAGA | 2195 | 33744 | FLT1:3664L21 anti- | UGUGCCAGCAGUCCAGCAUTsT | 2855 |
| | | | | sense siNA (3646C) | | |
| | | | | stab10 | | |
| 3645 | AUCAUGCUGGACUGCUGGCACAG | 2189 | 33749 | FLT1:3645U21 sense | B cAcGGucGucAGGucGuAcTT B | 2856 |
| | | | | siNA inv stab07 | | |
| 3646 | UCAUGCUGGACUGCUGGCACAGA | 2195 | 33750 | FLT1:3646U21 sense | B AcAcGGucGucAGGucGuATT B | 2857 |
| | | | | siNA inv stab07 | | |
| 3645 | AUCAUGCUGGACUGCUGGCACAG | 2189 | 33755 | FLT1:3663L21 anti- | GuAcGAccuGAcGAccGuGTsT | 2858 |
| | | | | sense siNA (3645C) | | |
| | | | | inv stab08 | | |
| 3646 | UCAUGCUGGACUGCUGGCACAGA | 2195 | 33756 | FLT1:3664L21 anti- | uAcGAccuGAcGAccGuGuTsT | 2859 |
| | | | | sense siNA (3646C) | | |
| | | | | inv stab08 | | |
| 3645 | AUCAUGCUGGACUGCUGGCACAG | 2189 | 33761 | FLT1:3645U21 sense | B CACGGUCGUCAGGUCGUACTT B | 2860 |
| | | | | siNA inv stab09 | | |
| 3646 | UCAUGCUGGACUGCUGGCACAGA | 2195 | 33762 | FLT1:3646U21 sense | B ACACGGUCGUCAGGUCGUATT B | 2861 |
| | | | | siNA inv stab09 | | |
| 3645 | AUCAUGCUGGACUGCUGGCACAG | 2189 | 33767 | FLT1:3663L21 anti- | GUACGACCUGACGACCGUGTsT | 2862 |
| | | | | sense siNA (3645C) inv | | |
| | | | | stab10 | | |
| 3646 | UCAUGCUGGACUGCUGGCACAGA | 2195 | 33768 | FLT1:3664L21 anti- | UACGACCUGACGACCGUGUTsT | 2863 |
| | | | | sense siNA (3646C) | | |
| | | | | inv stab10 | | |
| 349 | AACUGAGUUUAAAAGGCACCCAG | 2289 | 34487 | FLT1:349U21 sense | B CsUsGAGUUUsAsAsAsAsGGCAC | 2864 |
| | | | | siNA stab09 w/block | CsCsTsT B | |
| | | | | PS | | |
| 349 | AACUGAGUUUAAAAGGCACCCAG | 2289 | 34488 | FLT1:367L21 anti- | GGGsUsGsCsCsUUUUAAsAsCsUs | 2865 |
| | | | | sense | CsAGTsT | |
| | | | | siNA (349C) | | |
| | | | | stab10 w/block PS | | |
| 349 | AACUGAGUUUAAAAGGCACCCAG | 2289 | 34489 | FLT1:349U21 sense | B CsCsCACGGAsAsAsAsUsUUGAG | 2866 |
| | | | | siNA stab09 inv | UsCsTsTB | |
| | | | | w/block PS | | |
| 349 | AACUGAGUUUAAAAGGCACCCAG | 2289 | 34490 | FLT1:367L21 anti- | GACsUsCsAsAsAUUUUCsCsGsUs | 2867 |
| | | | | sense siNA (349C) | GsGGTsT | |
| | | | | stab10 inv w/block PS | | |
| 349 | AACUGAGUUUAAAAGGCACCCAG | 2289 | 29694 | FLT1:349U21 sense | CsUsGsAsGsUUUAAAAGGCACCCTsT | 2868 |
| | | | | siNA stab01 | | |
| 2340 | AACAACCACAAAAUACAACAAGA | 2292 | 29695 | FLT1:2340U21 sense | CsAsAsCsCsACAAAAUACAACAATsT | 2869 |
| | | | | siNA stab01 | | |
| 3912 | AGCCUGGAAAGAAUCAAAACCUU | 2291 | 29696 | FLT1:3912U21 sense | CsCsUsGsGsAAAGAAUCAAAACCTsT | 2870 |
| | | | | siNA stab01 | | |
| 2949 | AAGCAAGGAGGGCCUCUGAUGGU | 2290 | 29697 | FLT1:2949U21 sense | GsCsAsAsGsGAGGGCCUCUGAUGTsT | 2871 |
| | | | | siNA stab01 | | |
| 349 | AACUGAGUUUAAAAGGCACCCAG | 2289 | 29698 | FLT1:367L21 anti- | GsGsGsUsGsCCUUUUAAACUCA | 2872 |
| | | | | sense siNA (349C) | GTsT | |
| | | | | stab01 | | |
| 2340 | AACAACCACAAAAUACAACAAGA | 2292 | 29699 | FLT1:2358L21 anti- | UsUsGsUsUsGUAUUUUGUGGUUGTsT | 2873 |
| | | | | sense siNA (2340C) | | |
| | | | | stab01 | | |
| 3912 | AGCCUGGAAAGAAUCAAAACCUU | 2291 | 29700 | FLT1:3930L21 anti- | GsGsUsUsUsUGAUUCUUUCCAGGTsT | 2874 |
| | | | | sense siNA (3912C) | | |
| | | | | stab01 | | |
| 2949 | AAGCAAGGAGGGCCUCUGAUGGU | 2290 | 29701 | FLT1:2967L21 anti- | CsAsUsCsAsGAGGCCCUCCUUGCTsT | 2875 |
| | | | | sense siNA (2949C) | | |
| | | | | stab01 | | |
| 349 | AACUGAGUUUAAAAGGCACCCAG | 2289 | 29702 | FLT1:349U21 sense | csusGsAsGuuuAAAAGGcAcscscsTsT | 2876 |
| | | | | siNA stab03 | | |
| 2340 | AACAACCACAAAAUACAACAAGA | 2292 | 29703 | FLT1:2340U21 sense | csAsAscscAcAAAAuAcAAcsAsAsTsT | 2877 |
| | | | | siNA stab03 | | |
| 3912 | AGCCUGGAAAGAAUCAAAACCUU | 2291 | 29704 | FLT1:3912U21 sense | cscsusGsGAAAGAAucAAAAscscsTsT | 2878 |
| | | | | siNA stab03 | | |
| 2949 | AAGCAAGGAGGGCCUCUGAUGGU | 2290 | 29705 | FLT1:2949U21 sense | GscsAsAsGGAGGGccucuGAsusGsTsT | 2879 |
| | | | | siNA stab03 | | |
| 349 | AACUGAGUUUAAAAGGCACCCAG | 2289 | 29706 | FLT1:367L21 anti- | GsGsGsUsGsCsCsUsUsUsUsAsAs | 2880 |
| | | | | sense siNA (349C) | AsCsUsCsAsGsTsT | |
| | | | | stab02 | | |
| 2340 | AACAACCACAAAAUACAACAAGA | 2292 | 29707 | FLT1:2358L21 anti- | UsUsGsUsUsGsUsAsUsUsUsUsGs | 2881 |
| | | | | sense siNA (2340C) | UsGsGsUsUsGsTsT | |
| | | | | stab02 | | |
| 3912 | AGCCUGGAAAGAAUCAAAACCUU | 2291 | 29708 | FLT1:3930L21 anti- | GsGsUsUsUsUsGsAsUsUsCsUsUs | 2882 |
| | | | | sense siNA (3912C) | UsCsCsAsGsGsTsT | |
| | | | | stab02 | | |
| 2949 | AAGCAAGGAGGGCCUCUGAUGGU | 2290 | 29709 | FLT1:2967L21 anti- | CsAsUsCsAsGsAsGsGsCsCsCsUs | 2883 |
| | | | | sense siNA (2949C) | CsCsUsUsGsCsTsT | |
| | | | | stab02 | | |
| 2340 | AACAACCACAAAAUACAACAAGA | 2292 | 29981 | FLT1:2340U21 sense | CAACCACAAAAUACAACAAGA | 2884 |
| | | | | siNA Native | | |
| 2340 | AACAACCACAAAAUACAACAAGA | 2292 | 29982 | FLT1:2358L21 anti- | UUGUUGUAUUUUGUGGUUGUU | 2885 |
| | | | | sense siNA (2340C) | | |
| | | | | Native | | |
| 2340 | AACAACCACAAAAUACAACAAGA | 2292 | 29983 | FLT1:2340U21 sense | AsAsCsAsAsCAUAAAACACCAACTsT | 2886 |
| | | | | siNA stab01 inv | | |
| 2340 | AACAACCACAAAAUACAACAAGA | 2292 | 29984 | FLT1:2358L21 anti- | GsUsUsGsGsUGUUUUAUGUUGUUTsT | 2887 |
| | | | | sense siNA (2340C) | | |
| | | | | stab01 inv | | |
| 2340 | AACAACCACAAAAUACAACAAGA | 2292 | 29985 | FLT1:2340U21 sense | AsAscsAsAcAuAAAAcAccAsAscsTsT | 2888 |
| | | | | siNA stab03 inv | | |
| 2340 | AACAACCACAAAAUACAACAAGA | 2292 | 29986 | FLT1:2358L21 anti- | GsUsUsGsGsUsGsUsUsUsUsAsUs | 2889 |
| | | | | sense siNA (2340C) | GsUsUsGsUsUsTsT | |
| | | | | stab02 inv | | |
| 2340 | AACAACCACAAAAUACAACAAGA | 2292 | 29987 | FLT1:2340U21 sense | AGAACAACAUAAAACACCAAC | 2890 |
| | | | | siNA inv Native | | |
| 2340 | AACAACCACAAAAUACAACAAGA | 2292 | 29988 | FLT1:2358L21 anti- | UUGUUGGUGUUUUAUGUUGUU | 2891 |
| | | | | sense siNA (2340C) inv | | |
| | | | | Native | | |
| 2340 | AACAACCACAAAAUACAACAAGA | 2292 | 30075 | FLT1:2340U21 sense | CAACCACAAAAUACAACAATT | 2892 |
| | | | | siNA | | |
| 2340 | AACAACCACAAAAUACAACAAGA | 2292 | 30076 | FLT1:2358L21 anti- | UUGUUGUAUUUUGUGGUUGTT | 2893 |
| | | | | sense siNA (2340C) | | |
| 2342 | AACAACCACAAAAUACAACAAGA | 2292 | 30077 | FLT1:2342U21 sense | AGAACAACAUAAAACACCATT | 2894 |
| | | | | siNA inv | | |
| 2340 | AACAACCACAAAAUACAACAAGA | 2292 | 30078 | FLT1:2358L21 anti- | UUGUUGGUGUUUUAUGUUGTT | 2895 |
| | | | | sense siNA (2340C) | | |
| | | | | inv | | |
| 2340 | AACAACCACAAAAUACAACAAGA | 2292 | 30187 | FLT1:2358L21 anti- | uuGuuGuAuuuuGuGGuuGTT | 2896 |
| | | | | sense siNA (2340C) | | |
| | | | | 2′-F U,C | | |
| 2340 | AACAACCACAAAAUACAACAAGA | 2292 | 30190 | FLT1:2358L21 anti- | uuGuuGuAuuuuGuGGuuGXX | 2897 |
| | | | | sense siNA (2340C) | | |
| | | | | nitroindole | | |
| 2340 | AACAACCACAAAAUACAACAAGA | 2292 | 30193 | FLT1:2358L21 anti- | uuGuuGuAuuuuGuGGuuGZZ | 2898 |
| | | | | sense siNA (2340C) | | |
| | | | | nitropyrole | | |
| 2340 | AACAACCACAAAAUACAACAAGA | 2292 | 30196 | FLT1:2340U21 sense | B cAAccAcAAAAuAcAAcAATT B | 2899 |
| | | | | siNA stab04 | | |
| 2340 | AACAACCACAAAAUACAACAAGA | 2292 | 30199 | FLT1:2340U21 sense | cAAccAcAAAAuAcAAcAATT | 2900 |
| | | | | siNA sense iB caps | | |
| 2340 | AACAACCACAAAAUACAACAAGA | 2292 | 30340 | FLT1:2358L21 anti- | uuGuuGuAuuuuGuGGuuGTX | 2901 |
| | | | | sense siNA (2340C) | | |
| | | | | 3′dT | | |
| 2340 | AACAACCACAAAAUACAACAAGA | 2292 | 30341 | FLT1:2358L21 anti- | uuGuuGuAuuuuGuGGuuGTGly | 2902 |
| | | | | sense siNA (2340C) | | |
| | | | | glyceryl | | |
| 2340 | AACAACCACAAAAUACAACAAGA | 2292 | 30342 | FLT1:2358L21 anti- | uuGuuGuAuuuuGuGGuuGTU | 2903 |
| | | | | sense siNA (2340C) | | |
| | | | | 3′OMeU | | |
| 2340 | AACAACCACAAAAUACAACAAGA | 2292 | 30343 | FLT1:2358L21 anti- | uuGuuGuAuuuuGuGGuuGTt | 2904 |
| | | | | sense siNA (2340C) L- | | |
| | | | | dT | | |
| 2340 | AACAACCACAAAAUACAACAAGA | 2292 | 30344 | FLT1:2358L21 anti- | uuGuuGuAuuuuGuGGuuGTu | 2905 |
| | | | | sense siNA (2340C) L- | | |
| | | | | rU | | |
| 2340 | AACAACCACAAAAUACAACAAGA | 2292 | 30345 | FLT1:2358L21 anti- | uuGuuGuAuuuuGuGGuuGTD | 2906 |
| | | | | sense siNA (2340C) | | |
| | | | | idT | | |
| 2340 | AACAACCACAAAAUACAACAAGA | 2292 | 30346 | FLT1:2358L21 anti- | uuGuuGuAuuuuGuGGuuGXT | 2907 |
| | | | | sense siNA (2340C) | | |
| | | | | 3′dT | | |
| 2340 | AACAACCA0AAAAUACAACAAGA | 2292 | 30416 | FLT1:2358L21 anti- | uuGuuGuAuuuuGuGGuuGTsT | 2908 |
| | | | | sense siNA (2340C) | | |
| | | | | stab05 | | |
| 1184 | UCGUGUAAGGAGUGGACCAUCAU | 2303 | 30777 | FLT1:1184U21 sense | B GuGuAAGGAGuGGAccAucTT B | 2909 |
| | | | | siNA stab04 | | |
| 3503 | UUACGGAGUAUUGCUGUGGGAAA | 2304 | 30778 | FLT1:3503U21 sense | B AcGGAGuAuuGcuGuGGGATT B | 2910 |
| | | | | siNA stab04 | | |
| 4715 | UAGCAGGCCUAAGACAUGUGAGG | 2305 | 30779 | FLT1:4715U21 sense | B GcAGGccuAAGAcAuGuGATT B | 2911 |
| | | | | siNA 04 | | |
| 4753 | AGCAAAAAGCAAGGGAGAAAAGA | 2306 | 30780 | FLT1:4753U21 sense | B cAAAAAGcAAGGGAGAAAATT B | 2912 |
| | | | | siNA stab04 | | |
| 1184 | UCGUGUAAGGAGUGGACCAUCAU | 2303 | 30781 | FLT1:1202L21 anti- | GAuGGuccAcuccuuAcAcTsT | 2913 |
| | | | | sense siNA (1184C) | | |
| | | | | stab05 | | |
| 3503 | UUACGGAGUAUUGCUGUGGGAAA | 2304 | 30782 | FLT1:3521L21 anti- | ucccAcAGcAAuAcuccGuTsT | 2914 |
| | | | | sense siNA (3503C) | | |
| | | | | stab05 | | |
| 4715 | UAGCAGGCCUAAGACAUGUGAGG | 2305 | 30783 | FLT1:4733L21 anti- | ucAcAuGucuuAGGccuGcTsT | 2915 |
| | | | | sense siNA (4715C) | | |
| | | | | stab05 | | |
| 4753 | AGCAAAAAGCAAGGGAGAAAAGA | 2306 | 30784 | FLT1:4771L21 anti- | uuuucucccuuGcuuuuuGTsT | 2916 |
| | | | | sense siNA (4753C) | | |
| | | | | stab05 | | |
| 2340 | AACAACCACAAAAUACAACAAGA | 2292 | 30955 | FLT1:2340U21 sense | B cAAccAcAAAAuAcAAcAATT B | 2917 |
| | | | | siNA stab07 | | |
| 2340 | AACAACCACAAAAUACAACAAGA | 2292 | 30956 | FLT1:2358L21 anti- | uuGuuGuAuuuuGuGGuuGTsT | 2918 |
| | | | | sense siNA (2340C) | | |
| | | | | stab08 | | |
| 2340 | AACAACCACAAAAUACAACAAGA | 2292 | 30963 | FLT1:2340U21 sense | AACAACAUAAAACACCAACTT | 2919 |
| | | | | siNA inv | | |
| 2340 | AACAACCACAAAAUACAACAAGA | 2292 | 30964 | FLT1:2358L21 anti- | GUUGGUGUUUUAUGUUGUUTT | 2920 |
| | | | | sense siNA (2340C) | | |
| | | | | inv | | |
| 2340 | AACAACCACAAAAUACAACAAGA | 2292 | 30965 | FLT1:2340U21 sense | B AAcAAcAuAAAAcAccAAcTT B | 2921 |
| | | | | siNA stab04 inv | | |
| 2340 | AACAACCACAAAAUACAACAAGA | 2292 | 30966 | FLT1:2358L21 anti- | GuuGGuGuuuuAuGuuGuuTsT | 2922 |
| | | | | sense siNA (2340C) | | |
| | | | | stab05 inv | | |
| 2340 | AACAACCACAAAAUACAACAAGA | 2292 | 30967 | FLT1:2340U21 sense | B AAcAAcAuAAAAcAccAAcTT B | 2923 |
| | | | | siNA stab07 inv | | |
| 2340 | AACAACCACAAAAUACAACAAGA | 2292 | 30968 | FLT1:2358L21 anti- | GuuGGuGuuuuAuGuuGuuTsT | 2924 |
| | | | | sense siNA (2340C) | | |
| | | | | stab08 inv | | |
| 349 | AACUGAGUUUAAAAGGCACCCAG | 2289 | 31182 | FLT1:349U21 sense | CUGAGUUUAAAAGGCACCCTT | 2925 |
| | | | | siNA stab00 | | |
| 2949 | AAGCAAGGAGGGCCUCUGAUGGU | 2290 | 31183 | FLT1:2949U21 sense | GCAAGGAGGGCCUCUGAUGTT | 2926 |
| | | | | siNA TT | | |
| 3912 | AGCCUGGAAAGAAUCAAAACCUU | 2291 | 31184 | FLT1:3912U21 sense | CCUGGAAAGAAUCAAAACCTT | 2927 |
| | | | | siNA TT | | |
| 349 | AACUGAGUUUAAAAGGCACCCAG | 2289 | 31185 | FLT1:367L21 anti- | GGGUGCCUUUUAAACUCAGTT | 2928 |
| | | | | sense siNA (349C) | | |
| | | | | stab00 | | |
| 2949 | AAGCAAGGAGGGCCUCUGAUGGU | 2290 | 31186 | FLT1:2967L21 anti- | CAUCAGAGGCCCUCCUUGCTT | 2929 |
| | | | | sense siNA (2949C) TT | | |
| 3912 | AGCCUGGAAAGAAUCAAAACCUU | 2291 | 31187 | FLT1:3930L21 anti- | GGUUUUGAUUCUUUCCAGGTT | 2930 |
| | | | | sense siNA (3912C) TT | | |
| 349 | AACUGAGUUUAAAAGGCACCCAG | 2289 | 31188 | FLT1:349U21 sense | B cuGAGuuuAAAAGGcAcccTT B | 2931 |
| | | | | siNA stab04 | | |
| 2949 | AAGCAAGGAGGGCCUCUGAUGGU | 2290 | 31189 | FLT1:2949U21 sense | B GcAAGGAGGGccucuGAuGTT B | 2932 |
| | | | | siNA stab04 | | |
| 3912 | AGCCUGGAAAGAAUCAAAACCUU | 2291 | 31190 | FLT1:3912U21 sense | B ccuGGAAAGAAucAAAAccTT B | 2933 |
| | | | | siNA stab04 | | |
| 349 | AACUGAGUUUAAAAGGCACCCAG | 2289 | 31191 | FLT1:367L21 anti- | GGGuGccuuuuAAAcucAGTsT | 2934 |
| | | | | sense siNA (349C) | | |
| | | | | stab05 | | |
| 2949 | AAGCAAGGAGGGCCUCUGAUGGU | 2290 | 31192 | FLT1:2967L21 anti- | cAucAGAGGcccuccuuGcTsT | 2935 |
| | | | | sense siNA (2949C) | | |
| | | | | stab05 | | |
| 3912 | AGCCUGGAAAGAAUCAAAACCUU | 2291 | 31193 | FLT1:3930L21 anti- | GGuuuuGAuucuuuccAGGTsT | 2936 |
| | | | | sense siNA (3912C) | | |
| | | | | stab05 | | |
| 349 | AACUGAGUUUAAAAGGCACCCAG | 2289 | 31194 | FLT1:349U21 sense | B cuGAGuuuAAAAGGcAcccTT B | 2937 |
| | | | | siNA stab07 | | |
| 2949 | AAGCAAGGAGGGCCUCUGAUGGU | 2290 | 31195 | FLT1:2949U21 sense | B GcAAGGAGGGccucuGAuGTT B | 2938 |
| | | | | siNA stab07 | | |
| 3912 | AGCCUGGAAAGAAUCAAAACCUU | 2291 | 31196 | FLT1:3912U21 sense | B ccuGGAAAGAAucAAAAccTT B | 2939 |
| | | | | siNA stab07 | | |
| 349 | AACUGAGUUUAAAAGGCACCCAG | 2289 | 31197 | FLT1:367L21 anti- | GGGuGccuuuuAAAcucAGTsT | 2940 |
| | | | | sense siNA (349C) | | |
| | | | | stab08 | | |
| 2949 | AAGCAAGGAGGGCCUCUGAUGGU | 2290 | 31198 | FLT1:2967L21 anti- | cAucAGAGGcccuccuuGcTsT | 2941 |
| | | | | sense siNA (2949C) | | |
| | | | | stab08 | | |
| 3912 | AGCCUGGAAAGAAUCAAAACCUU | 2291 | 31199 | FLT1:3930L21 anti- | GGuuuuGAuucuuuccAGGTsT | 2942 |
| | | | | sense siNA (3912C) | | |
| | | | | stab08 | | |
| 349 | AACUGAGUUUAAAAGGCACCCAG | 2289 | 31200 | FLT1:349U21 sense | CCCACGGAAAAUUUGAGUCTT | 2943 |
| | | | | siNA inv TT | | |
| 2949 | AAGCAAGGAGGGCCUCUGAUGGU | 2290 | 31201 | FLT1:2949U21 sense | GUAGUCUCCGGGAGGAACGTT | 2944 |
| | | | | siNA inv TT | | |
| 3912 | AGCCUGGAAAGAAUCAAAACCUU | 2291 | 31202 | FLT1:391 2U21 sense | CCAAAACUAAGAAAGGUCCTT | 2945 |
| | | | | siNA inv TT | | |
| 349 | AACUGAGUUUAAAAGGCACCCAG | 2289 | 31203 | FLT1:367L21 anti- | GACUCAAAUUUUCCGUGGGTT | 2946 |
| | | | | sense siNA (349C) inv | | |
| | | | | TT | | |
| 2949 | AAGCAAGGAGGGCCUCUGAUGGU | 2290 | 31204 | FLT1:2967L21 anti- | CGUUCCUCCCGGAGACUACTT | 2947 |
| | | | | sense siNA (2949C) inv | | |
| | | | | TT | | |
| 3912 | AGCCUGGAAAGAAUCAAAACCUU | 2291 | 31205 | FLT1:3930L21 anti- | GGACCUUUCUUAGUUUUGGTT | 2948 |
| | | | | sense siNA (3912C) inv | | |
| | | | | TT | | |
| 349 | AACUGAGUUUAAAAGGCACCCAG | 2289 | 31206 | FLT1:349U21 sense | B cccAcGGAAAAuuuGAGucTT B | 2949 |
| | | | | siNA stab04 inv | | |
| 2949 | AAGCAAGGAGGGCCUCUGAUGGU | 2290 | 31207 | FLT1:2949U21 sense | B GuAGucuccGGGAGGAAcGTT B | 2950 |
| | | | | siNA stab04 inv | | |
| 3912 | AGCCUGGAAAGAAUCAAAACCUU | 2291 | 31208 | FLT1:3912U21 sense | B ccAAAAcuAAGAAAGGuccTT B | 2951 |
| | | | | siNA stab04 inv | | |
| 2949 | AAGCAAGGAGGGCCUCUGAUGGU | 2290 | 31510 | FLT1:2967L21 anti- | cAucAGAGGcccuccuuGcTsT | 2952 |
| | | | | sense siNA (2949C) | | |
| | | | | stab11 | | |
| 349 | AACUGAGUUUAAAAGGCACCCAG | 2289 | 31511 | FLT1:367L21 anti- | GGGuGccuuuuAAAcucAGTsT | 2953 |
| | | | | sense siNA (349C) | | |
| | | | | stab11 | | |
| 3912 | AGCCUGGAAAGAAUCAAAACCUU | 2291 | 31512 | FLT1:3930L21 anti- | GGuuuuGAuucuuuccAGGTsT | 2954 |
| | | | | sense siNA (3912C) | | |
| | | | | stab11 | | |
| 2340 | AACAACCACAAAAUACAACAAGA | 2292 | 31513 | FLT1:2358L21 anti- | GuuGGuGuuuuAuGuuGuuTsT | 2955 |
| | | | | sense siNA (2340C) | | |
| | | | | inv stab11 | | |
| 2949 | AAGCAAGGAGGGCCUCUGAUGGU | 2290 | 31514 | FLT1:2967L21 anti- | cGuuccucccGGAGAcuAcTsT | 2956 |
| | | | | sense siNA (2949C) | | |
| | | | | inv stab11 | | |
| 349 | AACUGAGUUUAAAAGGCACCCAG | 2289 | 31515 | FLT1:367L21 anti- | GAcucAAAuuuuccGuGGGTsT | 2957 |
| | | | | sense siNA (349C) | | |
| | | | | inv stab11 | | |
| 3912 | AGCCUGGAAAGAAUCAAAACCUU | 2291 | 31516 | FLT1:3930L21 anti- | GGAccuuucuuAGuuuuGGTsT | 2958 |
| | | | | sense siNA (3912C) | | |
| | | | | inv stab11 | | |
| 349 | AACUGAGUUUAAAAGGCACCCAG | 2289 | 34426 | 5′ n-1 C31270 | CUGAGUUUAAAAGGCACCCTT B | 2843 |
| | | | | FLT1:349U21 sense | | |
| | | | | siNA stab09 | | |
| 349 | AACUGAGUUUAAAAGGCACCCAG | 2289 | 34427 | 5′ n-2 C31270 | UGAGUUUAAAAGGCACCCTT B | 2959 |
| | | | | FLT1:349U21 sense | | |
| | | | | siNA stab09 | | |
| 349 | AACUGAGUUUAAAAGGCACCCAG | 2289 | 34428 | 5′ n-3 C31270 | GAGUUUAAAAGGCACCCTT B | 2960 |
| | | | | FLT1:349U21 sense | | |
| | | | | siNA stab09 | | |
| 349 | AACUGAGUUUAAAAGGCACCCAG | 2289 | 34429 | 5′ n-4 C31270 | AGUUUAAAAGGCACCCTT B | 2961 |
| | | | | FLT1:349U21 sense | | |
| | | | | siNA stab09 | | |
| 349 | AACUGAGUUUAAAAGGCACCCAG | 2289 | 34430 | 5′ n-5 C31270 | GUUUAAAAGGCACCCTT B | 2962 |
| | | | | FLT1:349U21 sense | | |
| | | | | siNA stab09 | | |
| 349 | AACUGAGUUUAAAAGGCACCCAG | 2289 | 34431 | 5′ n-7 C31270 | UUAAAAGGCACCCTT B | 2963 |
| | | | | FLT1:349U21 sense | | |
| | | | | siNA stab09 | | |
| 349 | AACUGAGUUUAAAAGGCACCCAG | 2289 | 34432 | 5′ n-9 C31270 | AAAAGGCACCCTT B | 2964 |
| | | | | FLT1:349U21 sense | | |
| | | | | siNA stab09 | | |
| 349 | AACUGAGUUUAAAAGGCACCCAG | 2289 | 34433 | 3′ n-1 C31270 | B CUGAGUUUAAAAGGCACCCTT | 2965 |
| | | | | FLT1:349U21 sense | | |
| | | | | siNA stab09 | | |
| 349 | AACUGAGUUUAAAAGGCACCCAG | 2289 | 34434 | 3′ n-2 C31270 | B CUGAGUUUAAAAGGCACCCT | 2966 |
| | | | | FLT1:349U21 sense | | |
| | | | | siNA stab09 | | |
| 349 | AACUGAGUUUAAAAGGCACCCAG | 2289 | 34435 | 3′ n-3 C31270 | B CUGAGUUUAAAAGGCACCC | 2967 |
| | | | | FLT1:349U21 sense | | |
| | | | | siNA stab09 | | |
| 349 | AACUGAGUUUAAAAGGCACCCAG | 2289 | 34436 | 3′ n-4 C31270 | B CUGAGUUUAAAAGGCACC | 2968 |
| | | | | FLT1:349U21 sense | | |
| | | | | siNA stab09 | | |
| 349 | AACUGAGUUUAAAAGGCACCCAG | 2289 | 34437 | 3′ n-5 C31270 | B CUGAGUUUAAAAGGCAC | 2969 |
| | | | | FLT1:349U21 sense | | |
| | | | | siNA stab09 | | |
| 349 | AACUGAGUUUAAAAGGCACCCAG | 2289 | 34438 | 3′ n-7 C31270 | B CUGAGUUUAAAAGGC | 2970 |
| | | | | FLT1:349U21 sense | | |
| | | | | siNA stab09 | | |
| 349 | AACUGAGUUUAAAAGGCACCCAG | 2289 | 34439 | 5′ n-1 C31273 | GGUGCCUUUUAAACUCAGTsT | 2971 |
| | | | | FLT1:367L21 anti- | | |
| | | | | sense siNA (349C) | | |
| | | | | stab10 | | |
| 349 | AACUGAGUUUAAAAGGCACCCAG | 2289 | 34440 | 5′ n-2 C31273 | GUGCCUUUUAAACUCAGTsT | 2972 |
| | | | | FLT1:367L21 anti- | | |
| | | | | sense siNA (349C) | | |
| | | | | stab10 | | |
| 349 | AACUGAGUUUAAAAGGCACCCAG | 2289 | 34441 | 5′ n-3 C31273 | UGCCUUUUAAACUCAGTsT | 2973 |
| | | | | FLT1:367L21 anti- | | |
| | | | | sense siNA (349C) | | |
| | | | | stab10 | | |
| 349 | AACUGAGUUUAAAAGGCACCCAG | 2289 | 34442 | 5′ n-4 C31273 | GCCUUUUAAACUCAGTsT | 2974 |
| | | | | FLT1:367L21 anti- | | |
| | | | | sense siNA (349C) | | |
| | | | | stab10 | | |
| 349 | AACUGAGUUUAAAAGGCACCCAG | 2289 | 34443 | 5′ n-5 C31273 | CCUUUUAAACUCAGTsT | 2975 |
| | | | | FLT1:367L21 anti- | | |
| | | | | sense siNA (349C) | | |
| | | | | stab10 | | |
| 349 | AACUGAGUUUAAAAGGCACCCAG | 2289 | 34444 | 3′ n-1 C31273 | GGGUGCCUUUUAAACUCAGT | 2976 |
| | | | | FLT1:367L21 anti- | | |
| | | | | sense siNA (349C) | | |
| | | | | stab10 | | |
| 349 | AACUGAGUUUAAAAGGCACCCAG | 2289 | 34445 | 3′ n-2 C31273 | GGGUGCCUUUUAAACUCAG | 2977 |
| | | | | FLT1:367L21 anti- | | |
| | | | | sense siNA (349C) | | |
| | | | | stab10 | | |
| 349 | AACUGAGUUUAAAAGGCACCCAG | 2289 | 34446 | 3′ n-3 C31273 | GGGUGCCUUUUAAACUCA | 2978 |
| | | | | FLT1:367L21 anti- | | |
| | | | | sense siNA (349C) | | |
| | | | | stab10 | | |
| 349 | AACUGAGUUUAAAAGGCACCCAG | 2289 | 34447 | 3′ n-4 C31273 | GGGUGCCUUUUAAACUC | 2979 |
| | | | | FLT1:367L21 anti- | | |
| | | | | sense siNA (349C) | | |
| | | | | stab10 | | |
| 349 | AACUGAGUUUAAAAGGCACCCAG | 2289 | 34448 | 3′ n-5 C31273 | GGGUGCCUUUUAAACU | 2980 |
| | | | | FLT1:367L21 anti- | | |
| | | | | sense siNA (349C) | | |
| | | | | stab10 | | |
| 349 | AACUGAGUUUAAAAGGCACCCAG | 2289 | 34449 | 3′ n-7 C31273 | GGGUGCCUUUUAAA | 2981 |
| | | | | FLT1:367L21 anti- | | |
| | | | | sense siNA (349C) | | |
| | | | | stab10 | | |
| 349 | AACUGAGUUUAAAAGGCACCCAG | 2289 | 34450 | 3′ n-9 C31273 | GGGUGCCUUUUA | 2982 |
| | | | | FLT1:367L21 anti- | | |
| | | | | sense siNA (349C) | | |
| | | | | stab10 | | |
| 349 | AACUGAGUUUAAAAGGCACCCAG | 2289 | 34452 | FLT1:367L21 anti- | CUACCAGCGAGUUUGUAGUUUA | 2983 |
| | | | | sense siNA (349C) | AAAAAAAAAAAAAsA | |
| | | | | scram1 + A15 all | | |
| | | | | 2′OMe | | |
| 349 | AACUGAGUUUAAAAGGCACCCAG | 2289 | 34453 | FLT1:367L21 anti- | CUACCAGCGAGUUUGUAGUUUA | 2984 |
| | | | | sense siNA (349C) | AAAAAAAAAAAAAAAAAAsA | |
| | | | | scram1 + A20 all | | |
| | | | | 2′OMe | | |
| 349 | AACUGAGUUUAAAAGGCACCCAG | 2289 | 34454 | FLT1:367L21 anti- | CUACCAGCGAGUUUGUAGUUUA | 2985 |
| | | | | sense siNA (349C) | AAAAAAAAAAAAAAAAAAAAAAAs | |
| | | | | scram1 + A25 all | A | |
| | | | | 2′OMe | | |
| 349 | AACUGAGUUUAAAAGGCACCCAG | 2289 | 34455 | FLT1:367L21 anti- | CUACCAGCGAGUUUGUAGUUUA | 2986 |
| | | | | sense siNA (349C) | AAAAAAAAAAAAAAAAAAAAAAAA | |
| | | | | scram1 + A30 all | AAAAsA | |
| | | | | 2′OMe | | |
| 1501 | ACCUCACUGCCACUCUAAUUGUC | 2307 | 34676 | FLT1:1501U21 sense | CUCACUGCCACUCUAAUUGTT | 2987 |
| | | | | siNA stab00 | | |
| 1502 | CCUCACUGCCACUCUAAUUGUCA | 2308 | 34677 | FLT1:1502U21 sense | UCACUGCCACUCUAAUUGUTT | 2988 |
| | | | | siNA stab00 | | |
| 1503 | CUCACUGCCACUCUAAUUGUCAA | 2309 | 34678 | FLT1:1503U21 sense | CACUGCCACUCUAAUUGUCTT | 2989 |
| | | | | siNA stab00 | | |
| 5353 | AAGACCCCGUCUCUAUACCAACC | 2310 | 34679 | FLT1:5353U21 sense | GACCCCGUCUCUAUACCAATT | 2990 |
| | | | | siNA stab00 | | |
| 1501 | ACCUCACUGCCACUCUAAUUGUC | 2307 | 34684 | FLT1:1519L21 (1501C) | CAAUUAGAGUGGCAGUGAGTT | 2991 |
| | | | | siRNA stab00 | | |
| 1502 | CCUCACUGCCACUCUAAUUGUCA | 2308 | 34685 | FLT1:1520L21 (1502C) | ACAAUUAGAGUGGCAGUGATT | 2992 |
| | | | | siRNA stab00 | | |
| 1503 | CUCACUGCCACUCUAAUUGUCAA | 2309 | 34686 | FLT1:1521L21 (1503C) | GACAAUUAGAGUGGCAGUGTT | 2993 |
| | | | | siRNA stab00 | | |
| 5353 | AAGACCCCGUCUCUAUACCAACC | 2310 | 34687 | FLT1:5371L21 (5353C) | UUGGUAUAGAGACGGGGUCTT | 2994 |
| | | | | siRNA stab00 | | |
| 349 | AACUGAGUUUAAAAGGCACCCAG | 2289 | 35117 | FLT1:349U21 sense | B cuGAGuuuAAAAGGCACCCTT B | 2995 |
| | | | | siNA stab07 N1 | | |
| 349 | AACUGAGUUUAAAAGGCACCCAG | 2289 | 35118 | FLT1:367L21 anti- | GGGUGCcuuuuAAAcucAGTsT | 2996 |
| | | | | sense siNA (349C) | | |
| | | | | stab08 N1 | | |
| 349 | AACUGAGUUUAAAAGGCACCCAG | 2289 | 35119 | FLT1:367L21 anti- | GGGUGccuuuuAAAcucAGTsT | 2997 |
| | | | | sense siNA (349C) | | |
| | | | | stab08 N2 | | |
| 349 | AACUGAGUUUAAAAGGCACCCAG | 2289 | 35120 | FLT1:367L21 anti- | GGGUGccuuuuAAAcucAGTsT | 2998 |
| | | | | sense siNA (349C) | | |
| | | | | stab08 N3 | | |
| 349 | AACUGAGUUUAAAAGGCACCCAG | 2289 | 35121 | FLT1:367L21 anti- | GGGuGccuuuuAAAcucAGTsT | 2999 |
| | | | | sense siNA (349C) | | |
| | | | | stab25 | | |
| 349 | AACUGAGUUUAAAAGGCACCCAG | 2289 | 35122 | FLT1:367L21 anti- | GGGuGccuuuuAAAcucAGTsT | 3000 |
| | | | | sense siNA (349C) | | |
| | | | | stab08 N5 | | |
| 349 | AACUGAGUUUAAAAGGCACCCAG | 2289 | 35123 | FLT1:367L21 anti- | GGGuGccuuuuAAAcucAGTsT | 3001 |
| | | | | sense siNA (349C) | | |
| | | | | stab24 | | |
| 346 | CUGAACUGAGUUUAAAAGGCACC | 2296 | 35814 | FLT1:346U21 sense | B GAAcuGAGuuuAAAAGGcATT B | 3002 |
| | | | | siNA stab23 | | |
| 346 | CUGAACUGAGUUUAAAAGGCACC | 2296 | 35815 | FLT1:346U21 sense | B GAAcuGAGuuuAAAAGGCATT B | 3003 |
| | | | | siNA stab07 N2 | | |
| 346 | CUGAACUGAGUUUAAAAGGCACC | 2296 | 35816 | FLT1:364L21 anti- | UGccuuuuAAAcucAGuucTsT | 3004 |
| | | | | sense siNA (346C) | | |
| | | | | stab24 | | |
| 346 | CUGAACUGAGUUUAAAAGGCACC | 2296 | 35817 | FLT1:364L21 anti- | UGccuuuuAAAcucAGuucTsT | 3005 |
| | | | | sense siNA (346C) | | |
| | | | | stab08 N2 | | |
| 346 | CUGAACUGAGUUUAAAAGGCACC | 2296 | 35818 | FLT1:364L21 anti- | UGCcuuuuAAAcucAGuucTsT | 3006 |
| | | | | sense siNA (346C) | | |
| | | | | stab24 | | |
| 346 | CUGAACUGAGUUUAAAAGGCACC | 2296 | 35909 | FLT1:346U21 sense | GAAcuGAGuUuAAAAGGcATT | 3007 |
| | | | | siNA stab07 J1 | | |
| 346 | CUGAACUGAGUUUAAAAGGCACC | 2296 | 35910 | FLT1:364L21 anti- | UGccuuuUAAAcucAGUucTsT | 3008 |
| | | | | sense siNA (346C) | | |
| | | | | stab08 J1 | | |
| 47 | GAGCGGGCUCCGGGGCUCGGGUG | 2311 | 36152 | FLT1:47U21 sense | GCGGGCUCCGGGGCUCGGGTT | 3009 |
| | | | | siNA stab00 | | |
| 121 | CUGGCUGGAGCCGCGAGACGGGC | 2312 | 36153 | FLT1:121U21 sense | GGCUGGAGCCGCGAGACGGTT | 3010 |
| | | | | siNA stab00 | | |
| 122 | UGGCUGGAGCCGCGAGACGGGCG | 2313 | 36154 | FLT1:122U21 sense | GCUGGAGCCGCGAGACGGGTT | 3011 |
| | | | | siNA stab00 | | |
| 251 | CAUGGUCAGCUACUGGGACACCG | 2314 | 36155 | FLT1:251U21 sense | UGGUCAGCUACUGGGACACTT | 3012 |
| | | | | siNA stab00 | | |
| 252 | AUGGUCAGCUACUGGGACACCGG | 2315 | 36156 | FLT1:252U21 sense | GGUCAGCUACUGGGACACCTT | 3013 |
| | | | | siNA stab00 | | |
| 354 | AGUUUAAAAGGCACCCAGCACAU | 2316 | 36157 | FLT1:354U21 sense | UUUAAAAGGCACCCAGCACTT | 3014 |
| | | | | siNA stab00 | | |
| 419 | AGCAGCCCAUAAAUGGUCUUUGC | 2317 | 36158 | FLT1:419U21 sense | CAGCCCAUAAAUGGUCUUUTT | 3015 |
| | | | | siNA stab00 | | |
| 594 | UCAAAGAAGAAGGAAACAGAAUC | 2318 | 36159 | FLT1:594U21 sense | AAAGAAGAAGGAAACAGAATT | 3016 |
| | | | | siNA stab00 | | |
| 595 | CAAAGAAGAAGGAAACAGAAUCU | 2319 | 36160 | FLT1:595U21 sense | AAGAAGAAGGAAACAGAAUTT | 3017 |
| | | | | siNA stab00 | | |
| 709 | AGCUCGUCAUUCCCUGCCGGGUU | 2320 | 36161 | FLT1:709U21 sense | CUCGUCAUUCCCUGCCGGGTT | 3018 |
| | | | | siNA stab00 | | |
| 710 | GCUCGUCAUUCCCUGCCGGGUUA | 2321 | 36162 | FLT1:710U21 sense | UCGUCAUUCCCUGCCGGGUTT | 3019 |
| | | | | siNA stab00 | | |
| 758 | AAAAAAGUUUCCACUUGACACUU | 2322 | 36163 | FLT1:758U21 sense | AAAAGUUUCCACUUGACACTT | 3020 |
| | | | | siNA stab00 | | |
| 759 | AAAAAGUUUCCACUUGACACUUU | 2323 | 36164 | FLT1:759U21 sense | AAAGUUUCCACUUGACACUTT | 3021 |
| | | | | siNA stab00 | | |
| 796 | AACGCAUAAUCUGGGACAGUAGA | 2324 | 36165 | FLT1:796U21 sense | CGCAUAAUCUGGGACAGUATT | 3022 |
| | | | | siNA stab00 | | |
| 797 | ACGCAUAAUCUGGGACAGUAGAA | 2325 | 36166 | FLT1:797U21 sense | GCAUAAUCUGGGACAGUAGTT | 3023 |
| | | | | siNA stab00 | | |
| 798 | CGCAUAAUCUGGGACAGUAGAAA | 2326 | 36167 | FLT1:798U21 sense | CAUAAUCUGGGACAGUAGATT | 3024 |
| | | | | siNA stab00 | | |
| 799 | GCAUAAUCUGGGACAGUAGAAAG | 2327 | 36168 | FLT1:799U21 sense | AUAAUCUGGGACAGUAGAATT | 3025 |
| | | | | siNA stab00 | | |
| 1220 | CACCUCAGUGCAUAUAUAUGAUA | 2328 | 36169 | FLT1:1220U21 sense | CCUCAGUGCAUAUAUAUGATT | 3026 |
| | | | | siNA stab00 | | |
| 1438 | CUGAAGAGGAUGCAGGGAAUUAU | 2329 | 36170 | FLT1:1438U21 sense | GAAGAGGAUGCAGGGAAUUTT | 3027 |
| | | | | siNA stab00 | | |
| 1541 | UUACGAAAAGGCCGUGUCAUCGU | 2330 | 36171 | FLT1:1541U21 sense | ACGAAAAGGCCGUGUCAUCTT | 3028 |
| | | | | siNA stab00 | | |
| 1640 | AAUCAAGUGGUUCUGGCACCCCU | 2331 | 36172 | FLT1:1640U21 sense | UCAAGUGGUUCUGGCACCCTT | 3029 |
| | | | | siNA stab00 | | |
| 1666 | ACCAUAAUCAUUCCGAAGCAAGG | 2332 | 36173 | FLT1:1666U21 sense | CAUAAUCAUUCCGAAGCAATT | 3030 |
| | | | | siNA stab00 | | |
| 1877 | GACUGUGGGAAGAAACAUAAGCU | 2333 | 36174 | FLT1:1877U21 sense | CUGUGGGAAGAAACAUAAGTT | 3031 |
| | | | | siNA stab00 | | |
| 2247 | AACCUCAGUGAUCACACAGUGGC | 2334 | 36175 | FLT1:2247U21 sense | CCUCAGUGAUCACACAGUGTT | 3032 |
| | | | | siNA stab00 | | |
| 2248 | ACCUCAGUGAUCACACAGUGGCC | 2335 | 36176 | FLT1:2248U21 sense | CUCAGUGAUCACACAGUGGTT | 3033 |
| | | | | siNA stab00 | | |
| 2360 | AGAGCCUGGAAUUAUUUUAGGAC | 2336 | 36177 | FLT1:2360U21 sense | AGCCUGGAAUUAUUUUAGGTT | 3034 |
| | | | | siNA stab00 | | |
| 2415 | ACAGAAGAGGAUGAAGGUGUCUA | 2337 | 36178 | FLT1:2415U21 sense | AGAAGAGGAUGAAGGUGUCTT | 3035 |
| | | | | siNA stab00 | | |
| 2514 | UCUAAUCUGGAGCUGAUCACUCU | 2338 | 36179 | FLT1:2514U21 sense | UAAUCUGGAGCUGAUCACUTT | 3036 |
| | | | | siNA stab00 | | |
| 2518 | AUCUGGAGCUGAUCACUCUAACA | 2339 | 36180 | FLT1:2518U21 sense | CUGGAGCUGAUCACUCUAATT | 3037 |
| | | | | siNA stab00 | | |
| 2703 | AGCAAGUGGGAGUUUGCCCGGGA | 2340 | 36181 | FLT1:2703U21 sense | CAAGUGGGAGUUUGCCCGGTT | 3038 |
| | | | | siNA stab00 | | |
| 2795 | CAUUAAGAAAUCACCUACGUGCC | 2341 | 36182 | FLT1:2795U21 sense | UUAAGAAAUCACCUACGUGTT | 3039 |
| | | | | siNA stab00 | | |
| 2965 | UGAUGGUGAUUGUUGAAUACUGC | 2342 | 36183 | FLT1:2965U21 sense | AUGGUGAUUGUUGAAUACUTT | 3040 |
| | | | | siNA stab00 | | |
| 3074 | GAAAGAAAAAAUGGAGCCAGGCC | 2343 | 36184 | FLT1:3074U21 sense | AAGAAAAAAUGGAGCCAGGTT | 3041 |
| | | | | siNA stab00 | | |
| 3100 | AACAAGGCAAGAAACCAAGACUA | 2344 | 36185 | FLT1:3100U21 sense | CAAGGCAAGAAACCAAGACTT | 3042 |
| | | | | siNA stab00 | | |
| 3101 | ACAAGGCAAGAAACCAAGACUAG | 2345 | 36186 | FLT1:3101U21 sense | AAGGCAAGAAACCAAGACUTT | 3043 |
| | | | | siNA stab00 | | |
| 3182 | GAGUGAUGUUGAGGAAGAGGAGG | 2346 | 36187 | FLT1:3182U21 sense | GUGAUGUUGAGGAAGAGGATT | 3044 |
| | | | | siNA stab00 | | |
| 3183 | AGUGAUGUUGAGGAAGAGGAGGA | 2347 | 36188 | FLT1:3183U21 sense | UGAUGUUGAGGAAGAGGAGTT | 3045 |
| | | | | siNA stab00 | | |
| 3253 | CUUACAGUUUUCAAGUGGCCAGA | 2348 | 36189 | FLT1:3253U21 sense | UACAGUUUUCAAGUGGCCATT | 3046 |
| | | | | siNA stab00 | | |
| 3254 | UUACAGUUUUCAAGUGGCCAGAG | 2349 | 36190 | FLT1:3254U21 sense | ACAGUUUUCAAGUGGCCAGTT | 3047 |
| | | | | siNA stab00 | | |
| 3260 | UUUUCAAGUGGCCAGAGGCAUGG | 2350 | 36191 | FLT1:3260U21 sense | UUCAAGUGGCCAGAGGCAUTT | 3048 |
| | | | | siNA stab00 | | |
| 3261 | UUUCAAGUGGCCAGAGGCAUGGA | 2351 | 36192 | FLT1:3261U21 sense | UCAAGUGGCCAGAGGCAUGTT | 3049 |
| | | | | siNA stab00 | | |
| 3294 | UCCAGAAAGUGCAUUCAUCGGGA | 2352 | 36193 | FLT1:3294U21 sense | CAGAAAGUGCAUUCAUCGGTT | 3050 |
| | | | | siNA stab00 | | |
| 3323 | AGCGAGAAACAUUCUUUUAUCUG | 2353 | 36194 | FLT1:3323U21 sense | CGAGAAACAUUCUUUUAUCTT | 3051 |
| | | | | siNA stab00 | | |
| 3324 | GCGAGAAACAUUCUUUUAUCUGA | 2354 | 36195 | FLT1:3324U21 sense | GAGAAACAUUCUUUUAUCUTT | 3052 |
| | | | | siNA stab00 | | |
| 3325 | CGAGAAACAUUCUUUUAUCUGAG | 2355 | 36196 | FLT1:3325U21 sense | AGAAACAUUCUUUUAUCUGTT | 3053 |
| | | | | siNA stab00 | | |
| 3513 | UUGCUGUGGGAAAUCUUCUCCUU | 2356 | 36197 | FLT1:3513U21 sense | GCUGUGGGAAAUCUUCUCCTT | 3054 |
| | | | | siNA stab00 | | |
| 3812 | UGCCUUCUCUGAGGACUUCUUCA | 2357 | 36198 | FLT1:3812U21 sense | CCUUCUCUGAGGACUUCUUTT | 3055 |
| | | | | siNA stab00 | | |
| 3864 | UCAGGAAGCUCUGAUGAUGUCAG | 2358 | 36199 | FLT1:3864U21 sense | AGGAAGCUCUGAUGAUGUCTT | 3056 |
| | | | | siNA stab00 | | |
| 3865 | CAGGAAGCUCUGAUGAUGUCAGA | 2359 | 36200 | FLT1:3865U21 sense | GGAAGCUCUGAUGAUGUCATT | 3057 |
| | | | | siNA stab00 | | |
| 3901 | UCAAGUUCAUGAGCCUGGAAAGA | 2360 | 36201 | FLT1:3901U21 sense | AAGUUCAUGAGCCUGGAAATT | 3058 |
| | | | | siNA stab00 | | |
| 3902 | CAAGUUCAUGAGCCUGGAAAGAA | 2361 | 36202 | FLT1:3902U21 sense | AGUUCAUGAGCCUGGAAAGTT | 3059 |
| | | | | siNA stab00 | | |
| 3910 | UGAGCCUGGAAAGAAUCAAAACC | 2362 | 36203 | FLT1:3910U21 sense | AGCCUGGAAAGAAUCAAAATT | 3060 |
| | | | | siNA stab00 | | |
| 4136 | CAGCUGUGGGCACGUCAGCGAAG | 2363 | 36204 | FLT1:4136U21 sense | GCUGUGGGCACGUCAGCGATT | 3061 |
| | | | | siNA stab00 | | |
| 4154 | CGAAGGCAAGCGCAGGUUCACCU | 2364 | 36205 | FLT1:4154U21 sense | AAGGCAAGCGCAGGUUCACTT | 3062 |
| | | | | siNA stab00 | | |
| 4635 | UGCAGCCCAPAACCCAGGGCAAC | 2365 | 36206 | FLT1:4635U21 sense | CAGCCCAAAACCCAGGGCATT | 3063 |
| | | | | siNA stab00 | | |
| 4945 | GAGGCAAGAAAAGGACAAAUAUC | 2366 | 36207 | FLT1:4945U21 sense | GGCAAGAAAAGGACAAAUATT | 3064 |
| | | | | siNA stab00 | | |
| 5090 | UUGGCUCCUCUAGUAAGAUGCAC | 2367 | 36208 | FLT1:5090U21 sense | GGCUCCUCUAGUAAGAUGCTT | 3065 |
| | | | | siNA stab00 | | |
| 5137 | GUCUCCAGGCCAUGAUGGCCUUA | 2368 | 36209 | FLT1:5137U21 sense | CUCCAGGCCAUGAUGGCCUTT | 3066 |
| | | | | siNA stab00 | | |
| 5138 | UCUCCAGGCCAUGAUGGCCUUAC | 2369 | 36210 | FLT1:5138U21 sense | UCCAGGCCAUGAUGGCCUUTT | 3067 |
| | | | | siNA stab00 | | |
| 5354 | AGACCCCGUCUCUAUACCAACCA | 2370 | 36211 | FLT1:5354U21 sense | ACCCCGUCUCUAUACCAACTT | 3068 |
| | | | | siNA stab00 | | |
| 5356 | ACCCCGUCUCUAUACCAACCAAA | 2371 | 36212 | FLT1:5356U21 sense | CCCGUCUCUAUACCAACCATT | 3069 |
| | | | | siNA stab00 | | |
| 5357 | CCCCGUCUCUAUACCAACCAAAC | 2372 | 36213 | FLT1:5357U21 sense | CCGUCUCUAUACCAACCAATT | 3070 |
| | | | | siNA stab00 | | |
| 5707 | GAUCAAGUGGGCCUUGGAUCGCU | 2373 | 36214 | FLT1:5707U21 sense | UCAAGUGGGCCUUGGAUCGTT | 3071 |
| | | | | siNA stab00 | | |
| 5708 | AUCAAGUGGGCCUUGGAUCGCUA | 2374 | 36215 | FLT1:5708U21 sense | CAAGUGGGCCUUGGAUCGCTT | 3072 |
| | | | | siNA stab00 | | |
| 47 | GAGCGGGCUCCGGGGCUCGGGUG | 2311 | 36216 | FLT1:65L21 anti- | CCCGAGCCCCGGAGCCCGCTT | 3073 |
| | | | | sense siNA (47C) | | |
| | | | | stab00 | | |
| 121 | CUGGCUGGAGCCGCGAGACGGGC | 2312 | 36217 | FLT1:139L21 anti- | CCGUCUCGCGGCUCCAGCCTT | 3074 |
| | | | | sense siNA (121C) | | |
| | | | | stab00 | | |
| 122 | UGGCUGGAGCCGCGAGACGGGCG | 2313 | 36218 | FLT1:140L21 anti- | CCCGUCUCGCGGCUCCAGCTT | 3075 |
| | | | | sense siNA (122C) | | |
| | | | | stab00 | | |
| 251 | CAUGGUCAGCUACUGGGACACCG | 2314 | 36219 | FLT1:269L21 anti- | GUGUCCCAGUAGCUGACCATT | 3076 |
| | | | | sense siNA (251C) | | |
| | | | | stab00 | | |
| 252 | AUGGUCAGCUACUGGGACACCGG | 2315 | 36220 | FLT1:270L21 anti- | GGUGUCCCAGUAGCUGACCTT | 3077 |
| | | | | sense siNA (252C) | | |
| | | | | stab00 | | |
| 354 | AGUUUAAAAGGCACCCAGCACAU | 2316 | 36221 | FLT1:372L21 anti- | GUGCUGGGUGCCUUUUAAATT | 3078 |
| | | | | sense siNA (354C) | | |
| | | | | stab00 | | |
| 419 | AGCAGCCCAUAAAUGGUCUUUGC | 2317 | 36222 | FLT1:437L21 anti- | AAAGACCAUUUAUGGGCUGTT | 3079 |
| | | | | sense siNA (419C) | | |
| | | | | stab00 | | |
| 594 | UCAAAGAAGAAGGAAACAGAAUC | 2318 | 36223 | FLT1:612L21 anti- | UUCUGUUUCCUUCUUCUUUTT | 3080 |
| | | | | sense siNA (594C) | | |
| | | | | stab00 | | |
| 595 | CAAAGAAGAAGGAAACAGAAUCU | 2319 | 36224 | FLT1:613L21 anti- | AUUCUGUUUCCUUCUUCUUTT | 3081 |
| | | | | sense siNA (595C) | | |
| | | | | stab00 | | |
| 709 | AGCUCGUCAUUCCCUGCCGGGUU | 2320 | 36225 | FLT1:727L21 anti- | CCCGGCAGGGAAUGACGAGTT | 3082 |
| | | | | sense siNA (709C) | | |
| | | | | stab00 | | |
| 710 | GCUCGUCAUUCCCUGCCGGGUUA | 2321 | 36226 | FLT1:728L21 anti- | ACCCGGCAGGGAAUGACGATT | 3083 |
| | | | | sense siNA (710C) | | |
| | | | | stab00 | | |
| 758 | AAAAAAGUUUCCACUUGACACUU | 2322 | 36227 | FLT1:776L21 anti- | GUGUCAAGUGGAAACUUUUTT | 3084 |
| | | | | sense siNA (758C) | | |
| | | | | stab00 | | |
| 759 | AAAAAGUUUCCACUUGACACUUU | 2323 | 36228 | FLT1:777L21 anti- | AGUGUCAAGUGGAAACUUUTT | 3085 |
| | | | | sense siNA (759C) | | |
| | | | | stab00 | | |
| 796 | AACGCAUAAUCUGGGACAGUAGA | 2324 | 36229 | FLT1:814L21 anti- | UACUGUCCCAGAUUAUGCGTT | 3086 |
| | | | | sense siNA (796C) | | |
| | | | | stab00 | | |
| 797 | ACGCAUAAUCUGGGACAGUAGAA | 2325 | 36230 | FLT1:815L21 anti- | CUACUGUCCCAGAUUAUGCTT | 3087 |
| | | | | sense siNA (797C) | | |
| | | | | stab00 | | |
| 798 | CGCAUAAUCUGGGACAGUAGAAA | 2326 | 36231 | FLT1:816L21 anti- | UCUACUGUCCCAGAUUAUGTT | 3088 |
| | | | | sense siNA (798C) | | |
| | | | | stab00 | | |
| 799 | GCAUAAUCUGGGACAGUAGAAAG | 2327 | 36232 | FLT1:817L21 anti- | UUCUACUGUCCCAGAUUAUTT | 3089 |
| | | | | sense siNA (799C) | | |
| | | | | stab00 | | |
| 1220 | CACCUCAGUGCAUAUAUAUGAUA | 2328 | 36233 | FLT1:1238L21 anti- | UCAUAUAUAUGCACUGAGGTT | 3090 |
| | | | | sense siNA (1220C) | | |
| | | | | stab00 | | |
| 1438 | CUGAAGAGGAUGCAGGGAAUUAU | 2329 | 36234 | FLT1:1456L21 anti- | AAUUCCCUGCAUCCUCUUCTT | 3091 |
| | | | | sense siNA (1438C) | | |
| | | | | stab00 | | |
| 1541 | UUACGAAAAGGCCGUGUCAUCGU | 2330 | 36235 | FLT1:1559L21 anti- | GAUGACACGGCCUUUUCGUTT | 3092 |
| | | | | sense siNA (1541C) | | |
| | | | | stab00 | | |
| 1640 | AAUCAAGUGGUUCUGGCACCCCU | 2331 | 36236 | FLT1:1658L21 anti- | GGGUGCCAGAACCACUUGATT | 3093 |
| | | | | sense siNA (1640C) | | |
| | | | | stab00 | | |
| 1666 | ACCAUAAUCAUUCCGAAGCAAGG | 2332 | 36237 | FLT1:1684L21 anti- | UUGCUUCGGAAUGAUUAUGTT | 3094 |
| | | | | sense siNA (1666C) | | |
| | | | | stab00 | | |
| 1877 | GACUGUGGGAAGAAACAUAAGCU | 2333 | 36238 | FLT1:1895L21 anti- | CUUAUGUUUCUUCCCACAGTT | 3095 |
| | | | | sense siNA (1877C) | | |
| | | | | stab00 | | |
| 2247 | AACCUCAGUGAUCACACAGUGGC | 2334 | 36239 | FLT1:2265L21 anti- | CACUGUGUGAUCACUGAGGTT | 3096 |
| | | | | sense siNA (2247C) | | |
| | | | | stab00 | | |
| 2248 | ACCUCAGUGAUCACACAGUGGCC | 2335 | 36240 | FLT1:2266L21 anti- | CCACUGUGUGAUCACUGAGTT | 3097 |
| | | | | sense siNA (2248C) | | |
| | | | | stab00 | | |
| 2360 | AGAGCCUGGAAUUAUUUUAGGAC | 2336 | 36241 | FLT1:2378L21 anti- | CCUAAAAUAAUUCCAGGCUTT | 3098 |
| | | | | sense siNA (2360C) | | |
| | | | | stab00 | | |
| 2415 | ACAGAAGAGGAUGAAGGUGUCUA | 2337 | 36242 | FLT1:2433L21 anti- | GACACCUUCAUCCUCUUCUTT | 3099 |
| | | | | sense siNA (2415C) | | |
| | | | | stab00 | | |
| 2514 | UCUAAUCUGGAGCUGAUCACUCU | 2338 | 36243 | FLT1:2532L21 anti- | AGUGAUCAGCUCCAGAUUATT | 3100 |
| | | | | sense siNA (2514C) | | |
| | | | | stab00 | | |
| 2518 | AUCUGGAGCUGAUCACUCUAACA | 2339 | 36244 | FLT1:2536L21 anti- | UUAGAGUGAUCAGCUCCAGTT | 3101 |
| | | | | sense siNA (2518C) | | |
| | | | | stab00 | | |
| 2703 | AGCAAGUGGGAGUUUGCCCGGGA | 2340 | 36245 | FLT1:2721L21 anti- | CCGGGCAAACUCCCACUUGTT | 3102 |
| | | | | sense siNA (2703C) | | |
| | | | | stab00 | | |
| 2795 | CAUUAAGAAAUCACCUACGUGCC | 2341 | 36246 | FLT1:2813L21 anti- | CACGUAGGUGAUUUCUUAATT | 3103 |
| | | | | sense siNA (2795C) | | |
| | | | | stab00 | | |
| 2965 | UGAUGGUGAUUGUUGAAUACUGC | 2342 | 36247 | FLT1:2983L21 anti- | AGUAUUCAACAAUCACCAUTT | 3104 |
| | | | | sense siNA (2965C) | | |
| | | | | stab00 | | |
| 3074 | GAAAGAAAAAAUGGAGCCAGGCC | 2343 | 36248 | FLT1:3092L21 anti- | CCUGGCUCCAUUUUUUCUUTT | 3105 |
| | | | | sense siNA (3074C) | | |
| | | | | stab00 | | |
| 3100 | AACAAGGCAAGAAACCAAGACUA | 2344 | 36249 | FLT1:3118L21 anti- | GUCUUGGUUUCUUGCCUUGTT | 3106 |
| | | | | sense siNA (3100C) | | |
| | | | | stab00 | | |
| 3101 | ACAAGGCAAGAAACCAAGACUAG | 2345 | 36250 | FLT1:3119L21 anti- | AGUCUUGGUUUCUUGCCUUTT | 3107 |
| | | | | sense siNA (3101C) | | |
| | | | | stab00 | | |
| 3182 | GAGUGAUGUUGAGGAAGAGGAGG | 2346 | 36251 | FLT1:3200L21 anti- | UCCUCUUCCUCAACAUCACTT | 3108 |
| | | | | sense siNA (3182C) | | |
| | | | | stab00 | | |
| 3183 | AGUGAUGUUGAGGAAGAGGAGGA | 2347 | 36252 | FLT1:3201L21 anti- | CUCCUCUUCCUCAACAUCATT | 3109 |
| | | | | sense siNA (3183C) | | |
| | | | | stab00 | | |
| 3253 | CUUACAGUUUUCAAGUGGCCAGA | 2348 | 36253 | FLT1:3271L21 anti- | UGGCCACUUGAAAACUGUATT | 3110 |
| | | | | sense siNA (3253C) | | |
| | | | | stab00 | | |
| 3254 | UUACAGUUUUCAAGUGGCCAGAG | 2349 | 36254 | FLT1:3272L21 anti- | CUGGCCACUUGAAAACUGUTT | 3111 |
| | | | | sense siNA (3254C) | | |
| | | | | stab00 | | |
| 3260 | UUUUCAAGUGGCCAGAGGCAUGG | 2350 | 36255 | FLT1:3278L21 anti- | AUGCCUCUGGCCACUUGAATT | 3112 |
| | | | | sense siNA (3260C) | | |
| | | | | stab00 | | |
| 3261 | UUUCAAGUGGCCAGAGGCAUGGA | 2351 | 36256 | FLT1:3279L21 anti- | CAUGCCUCUGGCCACUUGATT | 3113 |
| | | | | sense siNA (3261C) | | |
| | | | | stab00 | | |
| 3294 | UCCAGAAAGUGCAUUCAUCGGGA | 2352 | 36257 | FLT1:3312L21 anti- | CCGAUGAAUGCACUUUCUGTT | 3114 |
| | | | | sense siNA (3294C) | | |
| | | | | stab00 | | |
| 3323 | AGCGAGAAACAUUCUUUUAUCUG | 2353 | 36258 | FLT1:3341L21 anti- | GAUAAAAGAAUGUUUCUCGTT | 3115 |
| | | | | sense siNA (3323C) | | |
| | | | | stab00 | | |
| 3324 | GCGAGAAACAUUCUUUUAUCUGA | 2354 | 36259 | FLT1:3342L21 anti- | AGAUAAAAGAAUGUUUCUCTT | 3116 |
| | | | | sense siNA (3324C) | | |
| | | | | stab00 | | |
| 3325 | CGAGAAACAUUCUUUUAUCUGAG | 2355 | 36260 | FLT1:3343L21 anti- | CAGAUAAAAGAAUGUUUCUTT | 3117 |
| | | | | sense siNA (3325C) | | |
| | | | | stab00 | | |
| 3513 | UUGCUGUGGGAAAUCUUCUCCUU | 2356 | 36261 | FLT1:3531L21 anti- | GGAGAAGAUUUCCCACAGCTT | 3118 |
| | | | | sense siNA (3513C) | | |
| | | | | stab00 | | |
| 3812 | UGCCUUCUCUGAGGACUUCUUCA | 2357 | 36262 | FLT1:3830L21 anti- | AAGAAGUCCUCAGAGAAGGTT | 3119 |
| | | | | sense siNA (3812C) | | |
| | | | | stab00 | | |
| 3864 | UCAGGAAGCUCUGAUGAUGUCAG | 2358 | 36263 | FLT1:3882L21 anti- | GACAUCAUCAGAGCUUCCUTT | 3120 |
| | | | | sense siNA (3864C) | | |
| | | | | stab00 | | |
| 3865 | CAGGAAGCUCUGAUGAUGUCAGA | 2359 | 36264 | FLT1:3883L21 anti- | UGACAUCAUCAGAGCUUCCTT | 3121 |
| | | | | sense siNA (3865C) | | |
| | | | | stab00 | | |
| 3901 | UCAAGUUCAUGAGCCUGGAAAGA | 2360 | 36265 | FLT1:3919L21 anti- | UUUCCAGGCUCAUGAACUUTT | 3122 |
| | | | | sense siNA (3901C) | | |
| | | | | stab00 | | |
| 3902 | CAAGUUCAUGAGCCUGGAAAGAA | 2361 | 36266 | FLT1:3920L21 anti- | CUUUCCAGGCUCAUGAACUTT | 3123 |
| | | | | sense siNA (3902C) | | |
| | | | | stab00 | | |
| 3910 | UGAGCCUGGAAAGAAUCAAAACC | 2362 | 36267 | FLT1:3928L21 anti- | UUUUGAUUCUUUCCAGGCUTT | 3124 |
| | | | | sense siNA (3910C) | | |
| | | | | stab00 | | |
| 4136 | CAGCUGUGGGCACGUCAGCGAAG | 2363 | 36268 | FLT1:4154L21 anti- | UCGCUGACGUGCCCACAGCTT | 3125 |
| | | | | sense siNA (4136C) | | |
| | | | | stab00 | | |
| 4154 | CGAAGGCAAGCGCAGGUUCACCU | 2364 | 36269 | FLT1:4172L21 anti- | GUGAACCUGCGCUUGCCUUTT | 3126 |
| | | | | sense siNA (4154C) | | |
| | | | | stab00 | | |
| 4635 | UGCAGCCCAAAACCCAGGGCAAC | 2365 | 36270 | FLT1:4653L21 anti- | UGCCCUGGGUUUUGGGCUGTT | 3127 |
| | | | | sense siNA (4635C) | | |
| | | | | stab00 | | |
| 4945 | GAGGCAAGAAAAGGACAAAUAUC | 2366 | 36271 | FLT1:4963L21 anti- | UAUUUGUCCUUUUCUUGCCTT | 3128 |
| | | | | sense siNA (4945C) | | |
| | | | | stab00 | | |
| 5090 | UUGGCUCCUCUAGUAAGAUGCAC | 2367 | 36272 | FLT1:5108L21 anti- | GCAUCUUACUAGAGGAGCCTT | 3129 |
| | | | | sense siNA (5090C) | | |
| | | | | stab00 | | |
| 5137 | GUCUCCAGGCCAUGAUGGCCUUA | 2368 | 36273 | FLT1:5155L21 anti- | AGGCCAUCAUGGCCUGGAGTT | 3130 |
| | | | | sense siNA (5137C) | | |
| | | | | stab00 | | |
| 5138 | UCUCCAGGCCAUGAUGGCCUUAC | 2369 | 36274 | FLT1:5156L21 anti- | AAGGCCAUCAUGGCCUGGATT | 3131 |
| | | | | sense siNA (5138C) | | |
| | | | | stab00 | | |
| 5354 | AGACCCCGUCUCUAUACCAACCA | 2370 | 36275 | FLT1:5372L21 anti- | GUUGGUAUAGAGACGGGGUTT | 3132 |
| | | | | sense siNA (5354C) | | |
| | | | | stab00 | | |
| 5356 | ACCCCGUCUCUAUACCAACCAAA | 2371 | 36276 | FLT1:5374L21 anti- | UGGUUGGUAUAGAGACGGGTT | 3133 |
| | | | | sense siNA (5356C) | | |
| | | | | stab00 | | |
| 5357 | CCCCGUCUCUAUACCAACCAAAC | 2372 | 36277 | FLT1:5375L21 anti- | UUGGUUGGUAUAGAGACGGTT | 3134 |
| | | | | sense siNA (5357C) | | |
| | | | | stab00 | | |
| 5707 | GAUCAAGUGGGCCUUGGAUCGCU | 2373 | 36278 | FLT1:5725L21 anti- | CGAUCCAAGGCCCACUUGATT | 3135 |
| | | | | sense siNA (5707C) | | |
| | | | | stab00 | | |
| 5708 | AUCAAGUGGGCCUUGGAUCGCUA | 2374 | 36279 | FLT1:5726L21 anti- | GCGAUCCAAGGCCCACUUGTT | 3136 |
| | | | | sense siNA (5708C) | | |
| | | | | stab00 | | |
| 346 | CUGAACUGAGUUUAAAAGGCACC | 2296 | 36431 | FLT1:346U21 sense | GAACUGAGUUUAAAAGGCATT | 3137 |
| | | | | siNA stab00 | | |
| 346 | CUGAACUGAGUUUAAAAGGCACC | 2296 | 36439 | FLT1:364121 anti- | UGCCUUUUAAACUCAGUUCTT | 3138 |
| | | | | sense siNA (346C) | | |
| | | | | stab00 | | |
| 349 | AACUGAGUUUAAAAGGCACCCAG | 2289 | 36457 | FLT1:349U19 sense | CUGAGUUUAAAAGGCACCC | 3139 |
| | | | | siNA stab00 -3′ TT | | |
| 349 | AACUGAGUUUAAAAGGCACCCAG | 2289 | 36458 | FLT1:367L21 anti- | B GGGUGCCUUUUAAACUCAGTsT B | 3140 |
| | | | | sense siNA (349C) | | |
| | | | | stab10 + 5′ & 3′ iB | | |
| 349 | AACUGAGUUUAAAAGGCACCCAG | 2289 | 36459 | FLT1:367L19 siRNA | B GGGUGCCUUUUAAACUCAG | 3141 |
| | | | | (349C) stab00 + 5 iB | | |
| | | | | -3′ TT | | |
| 349 | AACUGAGUUUAAAAGGCACCCAG | 2289 | 36460 | FLT1:349U21 sense | cuGAGuuuAAAAGGcAcccTT | 3142 |
| | | | | siNA stab07 -5′ & 3′ | | |
| | | | | iB | | |
| 349 | AACUGAGUUUAAAAGGCACCCAG | 2289 | 36461 | FLT1:349U21 sense | cuGAGuuuAAAAGGcAccc | 3143 |
| | | | | siNA stab07 -5′ | | |
| | | | | iB -3′ TTB | | |
| 349 | AACUGAGUUUAAAAGGCACCCAG | 2289 | 36462 | FLT1:367L19 siRNA | GGGuGccuuuuAAAcucAG | 3144 |
| | | | | (349C) stab08 -3′ TsT | | |
| 2338 | AAAACAACCACAAAAUACAACAA | 2375 | 37389 | FLT1:2338U21 sense | B AAcAAccAcAAAAuAcAAcTT B | 3145 |
| | | | | siNA stab07 | | |
| 2342 | CAACCACAAAAUACAACAAGAGC | 2376 | 37390 | FLT1:2342U21 sense | B AccAcAAAAuAcAAcAAGATT B | 3146 |
| | | | | siNA stab07 | | |
| 2365 | CUGGAAUUAUUUUAGGACCAGGA | 2377 | 37391 | FLT1:2365U21 sense | B GGAAuuAuuuuAGGAccAGTT B | 3147 |
| | | | | siNA stab07 | | |
| 2391 | AGCACGCUGUUUAUUGAAAGAGU | 2378 | 37392 | FLT1:2391U21 sense | B cAcGcuGuuuAuuGAAAGATT B | 3148 |
| | | | | siNA stab07 | | |
| 2392 | GCACGCUGUUUAUUGAAAGAGUC | 2379 | 37393 | FLT1:2392U21 sense | B AcGcuGuuuAuuGAAAGAGTT B | 3149 |
| | | | | siNA stab07 | | |
| 2393 | CACGCUGUUUAUUGAAAGAGUCA | 2380 | 37394 | FLT1:2393U21 sense | B cGcuGuuuAuuGAAAGAGuTT B | 3150 |
| | | | | siNA stab07 | | |
| 2394 | ACGCUGUUUAUUGAAAGAGUCAC | 2381 | 37395 | FLT1:2394U21 sense | B GcuGuuuAuuGAAAGAGucTT B | 3151 |
| | | | | siNA stab07 | | |
| 2395 | CGCUGUUUAUUGAAAGAGUCACA | 2382 | 37396 | FLT1:2395U21 sense | B cuGuuuAuuGAAAGAGucATT B | 3152 |
| | | | | siNA stab07 | | |
| 2396 | GCUGUUUAUUGAAAGAGUCACAG | 2383 | 37397 | FLT1:2396U21 sense | B uGuuuAuuGAAAGAGucAcTT B | 3153 |
| | | | | siNA stab07 | | |
| 2397 | CUGUUUAUUGAAAGAGUCACAGA | 2384 | 37398 | FLT1:2397U21 sense | B GuuuAuuGAAAGAGucAcATT B | 3154 |
| | | | | siNA stab07 | | |
| 2398 | UGUUUAUUGAAAGAGUCACAGAA | 2385 | 37399 | FLT1:2398U21 sense | B uuuAuuGAAAGAGucAcAGTT B | 3155 |
| | | | | siNA stab07 | | |
| 2697 | GAUGCCAGCAAGUGGGAGUUUGC | 2386 | 37400 | FLT1:2697U21 sense | B uGccAGcAAGuGGGAGuuuTT B | 3156 |
| | | | | siNA stab07 | | |
| 2699 | UGCCAGCAAGUGGGAGUUUGCCC | 2387 | 37401 | FLT1:2699U21 sense | B ccAGcAAGuGGGAGuuuGcTT B | 3157 |
| | | | | siNA stab07 | | |
| 2785 | CAGCAUUUGGCAUUAAGAAAUCA | 2388 | 37402 | FLT1:2785U21 sense | B GcAuuuGGcAuuAAGAAAuTT B | 3158 |
| | | | | siNA stab07 | | |
| 2786 | AGCAUUUGGCAUUAAGAAAUCAC | 2389 | 37403 | FLT1:2786U21 sense | B cAuuuGGcAuuAAGAAAucTT B | 3159 |
| | | | | siNA stab07 | | |
| 2788 | CAUUUGGCAUUAAGAAAUCACCU | 2390 | 37405 | FLT1:2788U21 sense | B uuuGGcAuuAAGAAAucAcTT B | 3160 |
| | | | | siNA stab07 | | |
| 2789 | AUUUGGCAUUAAGAAAUCACCUA | 2391 | 37406 | FLT1:2789U21 sense | B uuGGcAuuAAGAAAucAccTT B | 3161 |
| | | | | siNA stab07 | | |
| 2812 | CGUGCCGGACUGUGGCUGUGAAA | 2392 | 37407 | FLT1:2812U21 sense | B uGccGGAcuGuGGcuGuGATT B | 3162 |
| | | | | siNA stab07 | | |
| 2860 | GCGAGUACAAAGCUCUGAUGACU | 2393 | 37408 | FLT1:2860U21 sense | B GAGuAcAAAGcucuGAuGATT B | 3163 |
| | | | | siNA stab07 | | |
| 2861 | CGAGUACAAAGCUCUGAUGACUG | 2394 | 37409 | FLT1:2861U21 sense | B AGuAcAAAGcucuGAuGAcTT B | 3164 |
| | | | | siNA stab07 | | |
| 2947 | CCAAGCAAGGAGGGCCUCUGAUG | 2395 | 37410 | FLT1:2947U21 sense | B AAGcAAGGAGGGccucuGATT B | 3165 |
| | | | | siNA stab07 | | |
| 2950 | AGCAAGGAGGGCCUCUGAUGGUG | 2396 | 37411 | FLT1:2950U21 sense | B cAAGGAGGGccucuGAuGGTT B | 3166 |
| | | | | siNA stab07 | | |
| 2952 | CAAGGAGGGCCUCUGAUGGUGAU | 2397 | 37412 | FLT1:2952U21 sense | B AGGAGGGccucuGAuGGuGTT B | 3167 |
| | | | | siNA stab07 | | |
| 2953 | AAGGAGGGCCUCUGAUGGUGAUU | 2398 | 37413 | FLT1:2953U21 sense | B GGAGGGccucuGAuGGuGATT B | 3168 |
| | | | | siNA stab07 | | |
| 2954 | AGGAGGGCCUCUGAUGGUGAUUG | 2399 | 37414 | FLT1:2954U21 sense | B GAGGGccucuGAuGGuGAuTT B | 3169 |
| | | | | siNA stab07 | | |
| 3262 | UUCAAGUGGCCAGAGGCAUGGAG | 2400 | 37415 | FLT1:3262U21 sense | B cAAGuGGccAGAGGcAuGGTT B | 3170 |
| | | | | siNA stab07 | | |
| 3263 | UCAAGUGGCCAGAGGCAUGGAGU | 2401 | 37416 | FLT1:3263U21 sense | B AAGuGGccAGAGGcAuGGATT B | 3171 |
| | | | | siNA stab07 | | |
| 3266 | AGUGGCCAGAGGCAUGGAGUUCC | 2402 | 37417 | FLT1:3266U21 sense | B uGGccAGAGGcAuGGAGuuTT B | 3172 |
| | | | | siNA stab07 | | |
| 3911 | GAGCCUGGAAAGAAUCAAAACCU | 2403 | 37418 | FLT1:3911U21 sense | B GccuGGAAAGAAucAAAAcTT B | 3173 |
| | | | | siNA stab07 | | |
| 4419 | UUUUUUGACUAACAAGAAUGUAA | 2404 | 37419 | FLT1:4419U21 sense | B uuuuGAcuAAcAAGAAuGuTT B | 3174 |
| | | | | siNA stab07 | | |
| 346 | CUGAACUGAGUUUAAAAGGCACC | 2296 | 37420 | FLT1:364L21 anti- | UGCcuuuuAAAcucAGuucTT | 3175 |
| | | | | sense siNA (346C) | | |
| | | | | stab26 | | |
| 347 | UGAACUGAGUUUAAAAGGCACCC | 2297 | 37421 | FLT1:365L21 anti- | GUGccuuuuAAAcucAGuuTT | 3176 |
| | | | | sense siNA (347C) | | |
| | | | | stab26 | | |
| 349 | AACUGAGUUUAAAAGGCACCCAG | 2289 | 37422 | FLT1:367L21 anti- | GGGuGccuuuuAAAcucAGTT | 3177 |
| | | | | sense siNA (349C) | | |
| | | | | stab26 | | |
| 351 | CUGAGUUUAAAAGGCACCCAGCA | 2300 | 37423 | FLT1:369L21 anti- | CUGGGuGccuuuuAAAcucTT | 3178 |
| | | | | sense siNA (351C) | | |
| | | | | stab26 | | |
| 353 | GAGUUUAAAAGGCACCCAGCACA | 2302 | 37424 | FLT1:371L21 anti- | UGCuGGGuGccuuuuAAAcTT | 3179 |
| | | | | sense siNA (353C) | | |
| | | | | stab26 | | |
| 1956 | GAAGGAGAGGACCUGAAACUGUC | 2286 | 37425 | FLT1:1974L21 anti- | CAGuuucAGGuccucuccuTT | 3180 |
| | | | | sense siNA (1956C) | | |
| | | | | stab26 | | |
| 1957 | AAGGAGAGGACCUGAAACUGUCU | 2287 | 37426 | FLT1:1975L21 anti- | ACAGuuucAGGuccucuccTT | 3181 |
| | | | | sense siNA (1957C) | | |
| | | | | stab26 | | |
| 2338 | AAAACAACCACAAAAUACAACAA | 2375 | 37427 | FLT1:2356L21 anti- | GUUGuAuuuuGuGGuuGuuTT | 3182 |
| | | | | sense siNA (2338C) | | |
| | | | | stab26 | | |
| 2340 | AACAACCACAAAAUACAACAAGA | 2292 | 37428 | FLT1:2358L21 anti- | UUGuuGuAuuuuGuGGuuGTT | 3183 |
| | | | | sense siNA (2340C) | | |
| | | | | stab26 | | |
| 2342 | CAACCACAAAAUACAACAAGAGC | 2376 | 37429 | FLT1:2360L21 anti- | UCUuGuuGuAuuuuGuGGuTT | 3184 |
| | | | | sense siNA (2342C) | | |
| | | | | stab26 | | |
| 2365 | CUGGAAUUAUUUUAGGACCAGGA | 2377 | 37430 | FLT1:2383L21 anti- | CUGGuccuAAAAuAAuuccTT | 3185 |
| | | | | sense siNA (2365C) | | |
| | | | | stab26 | | |
| 2391 | AGCACGCUGUUUAUUGAAAGAGU | 2378 | 37431 | FLT1:2409L21 anti- | UCUuucAAuAAAcAGcGuGTT | 3186 |
| | | | | sense siNA (2391C) | | |
| | | | | stab26 | | |
| 2392 | GCACGCUGUUUAUUGAAAGAGUC | 2379 | 37432 | FLT1:2410L21 anti- | CUCuuucAAuAAAcAGcGuTT | 3187 |
| | | | | sense siNA (2392C) | | |
| | | | | stab26 | | |
| 2393 | CACGCUGUUUAUUGAAAGAGUCA | 2380 | 37433 | FLT1:2411L21 anti- | ACUcuuucAAuAAAcAGcGTT | 3188 |
| | | | | sense siNA (2393C) | | |
| | | | | stab26 | | |
| 2394 | ACGCUGUUUAUUGAAAGAGUCAC | 2381 | 37434 | FLT1:2412L21 anti- | GACucuuucAAuAAAcAGcTT | 3189 |
| | | | | sense siNA (2394C) | | |
| | | | | stab26 | | |
| 2395 | CGCUGUUUAUUGAAAGAGUCACA | 2382 | 37435 | FLT1:2413L21 anti- | UGAcucuuucAAuAAAcAGTT | 3190 |
| | | | | sense siNA (2395C) | | |
| | | | | stab26 | | |
| 2396 | GCUGUUUAUUGAAAGAGUCACAG | 2383 | 37436 | FLT1:2414L21 anti- | GUGAcucuuucAAuAAAcATT | 3191 |
| | | | | sense siNA (2396C) | | |
| | | | | stab26 | | |
| 2397 | CUGUUUAUUGAAAGAGUCACAGA | 2384 | 37437 | FLT1:2415L21 anti- | UGUGAcucuuucAAuAAAcTT | 3192 |
| | | | | sense siNA (2397C) | | |
| | | | | stab26 | | |
| 2398 | UGUUUAUUGAAAGAGUCACAGAA | 2385 | 37438 | FLT1:2416L21 anti- | CUGuGAcucuuucAAuAAATT | 3193 |
| | | | | sense siNA (2398C) | | |
| | | | | stab26 | | |
| 2697 | GAUGCCAGCAAGUGGGAGUUUGC | 2386 | 37439 | FLT1:2715L21 anti- | AAAcucccAcuuGcuGGcATT | 3194 |
| | | | | sense siNA (2697C) | | |
| | | | | stab26 | | |
| 2699 | UGCCAGCAAGUGGGAGUUUGCCC | 2387 | 37440 | FLT1:2717L21 anti- | GCAAAcucccAcuuGcuGGTT | 3195 |
| | | | | sense siNA (2699C) | | |
| | | | | stab26 | | |
| 2785 | CAGCAUUUGGCAUUAAGAAAUCA | 2388 | 37441 | FLT1:2803L21 anti- | AUUucuuAAuGccAAAuGcTT | 3196 |
| | | | | sense siNA (2785C) | | |
| | | | | stab26 | | |
| 2786 | AGCAUUUGGCAUUAAGAAAUCAC | 2389 | 37442 | FLT1:2804L21 anti- | GAUuucuuAAuGccAAAuGTT | 3197 |
| | | | | sense siNA (2786C) | | |
| | | | | stab26 | | |
| 2787 | GCAUUUGGCAUUAAGAAAUCACC | 2288 | 37443 | FLT1:2805L21 anti- | UGAuuucuuAAuGccAAAuTT | 3198 |
| | | | | sense siNA (2787C) | | |
| | | | | stab26 | | |
| 2788 | CAUUUGGCAUUAAGAAAUCACCU | 2390 | 37444 | FLT1:2806L21 anti- | GUGAuuucuuAAuGccAAATT | 3199 |
| | | | | sense siNA (2788C) | | |
| | | | | stab26 | | |
| 2789 | AUUUGGCAUUAAGAAAUCACCUA | 2391 | 37445 | FLT1:2807L21 anti- | GGUGAuuucuuAAuGccAATT | 3200 |
| | | | | sense siNA (2789C) | | |
| | | | | stab26 | | |
| 2812 | CGUGCCGGACUGUGGCUGUGAAA | 2392 | 37446 | FLT1:2830L21 anti- | UCAcAGccAcAGuccGGcATT | 3201 |
| | | | | sense siNA (2812C) | | |
| | | | | stab26 | | |
| 2860 | GCGAGUACAAAGCUCUGAUGACU | 2393 | 37447 | FLT1:2878L21 anti- | UCAucAGAGcuuuGuAcucTT | 3202 |
| | | | | sense siNA (2860C) | | |
| | | | | stab26 | | |
| 2861 | CGAGUACAAAGCUCUGAUGACUG | 2394 | 37448 | FLT1:2879L21 anti- | GUCAucAGAGcuuuGuAcuTT | 3203 |
| | | | | sense siNA (2861C) | | |
| | | | | stab26 | | |
| 2947 | CCAAGCAAGGAGGGCCUCUGAUG | 2395 | 37449 | FLT1:2965L21 anti- | UCAGAGGcccuccuuGcuuTT | 3204 |
| | | | | sense siNA (2947C) | | |
| | | | | stab26 | | |
| 2949 | AAGCAAGGAGGGCCUCUGAUGGU | 2290 | 37450 | FLT1:2967L21 anti- | CAUcAGAGGcccuccuuGcTT | 3205 |
| | | | | sense siNA (2949C) | | |
| | | | | stab26 | | |
| 2950 | AGCAAGGAGGGCCUCUGAUGGUG | 2396 | 37451 | FLT1:2968L21 anti- | CCAucAGAGGcccuccuuGTT | 3206 |
| | | | | sense siNA (2950C) | | |
| | | | | stab26 | | |
| 2952 | CAAGGAGGGCCUCUGAUGGUGAU | 2397 | 37452 | FLT1:2970L21 anti- | CACcAucAGAGGcccuccuTT | 3207 |
| | | | | sense siNA (2952C) | | |
| | | | | stab26 | | |
| 2953 | AAGGAGGGCCUCUGAUGGUGAUU | 2398 | 37453 | FLT1:2971L21 anti- | UCAccAucAGAGGcccuccTT | 3208 |
| | | | | sense siNA (2953C) | | |
| | | | | stab26 | | |
| 2954 | AGGAGGGCCUCUGAUGGUGAUUG | 2399 | 37454 | FLT1:2972L21 anti- | AUCAccAucAGAGGcccucTT | 3209 |
| | | | | sense siNA (2954C) | | |
| | | | | stab26 | | |
| 3262 | UUCAAGUGGCCAGAGGCAUGGAG | 2400 | 37455 | FLT1:3280L21 anti- | CCAuGccucuGGccAcuuGTT | 3210 |
| | | | | sense siNA (3262C) | | |
| | | | | stab26 | | |
| 3263 | UCAAGUGGCCAGAGGCAUGGAGU | 2401 | 37456 | FLT1:3281L21 anti- | UCCAuGccucuGGccAcuuTT | 3211 |
| | | | | sense siNA (3263C) | | |
| | | | | stab26 | | |
| 3266 | AGUGGCCAGAGGCAUGGAGUUCC | 2402 | 37457 | FLT1:3284L21 anti- | AACuccAuGccucuGGccATT | 3212 |
| | | | | sense siNA (3266C) | | |
| | | | | stab26 | | |
| 3911 | GAGCCUGGAAAGAAUCAAAACCU | 2403 | 37458 | FLT1:3929L21 anti- | GUUuuGAuucuuuccAGGcTT | 3213 |
| | | | | sense siNA (3911C) | | |
| | | | | stab26 | | |
| 4419 | UUUUUUGACUAACAAGAAUGUAA | 2404 | 37459 | FLT1:4437L21 anti- | ACAuucuuGuuAGucAAAATT | 3214 |
| | | | | sense siNA (4419C) | | |
| | | | | stab26 | | |
| 3646 | UCAUGCUGGACUGCUGGCACAGA | 2195 | 37576 | FLT1:3664L21 anti- | UGUGccAGcAGuccAGcAuTT | 3215 |
| | | | | sense siNA (3646C) | | |
| | | | | stab26 | | |
| 349 | AACUGAGUUUAAAAGGCACCCAG | 2289 | 38285 | 5′CB 31270 | CBUGAGUUUAAAAGGCACCCTT B | 3216 |
| | | | | FLT1:349U21 sense | | |
| | | | | siNA stab09 | | |

VEGFR2

| | | | |
|---|---|---|---|
| Target | Seq | Cmpd | Seq |

| | | | | | | |
|---|---|---|---|---|---|---|
| Pos | Target | ID | # | Aliases | Sequence | ID |

| | | | | | | |
|---|---|---|---|---|---|---|
| 3304 | UGACCUUGGAGCAUCUCAUCUGU | 2405 | | KDR:3304U21 sense | B AccuuGGAGcAucucAucuTT B | 3217 |
| | | | | siNA stab04 | | |
| 3894 | UCACCUGUUUCCUGUAUGGAGGA | 2406 | | KDR:3894U21 sense | B AccuGuuuccuGuAuGGAGTT B | 3218 |
| | | | | siNA stab04 | | |
| 3304 | UGACCUUGGAGCAUCUCAUCUGU | 2405 | | KDR:3322L21 anti- | AGAuGAGAuGcuccAAGGuTsT | 3219 |
| | | | | sense siNA (3304C) | | |
| | | | | stab05 | | |
| 3894 | UCACCUGUUUCCUGUAUGGAGGA | 2406 | | KDR:3912L21 anti- | cuccAuAcAGGAAAcAGGuTsT | 3220 |
| | | | | sense siNA (3894C) | | |
| | | | | stab05 | | |
| 3304 | UGACCUUGGAGCAUCUCAUCUGU | 2405 | | KDR:3304U21 sense | B AccuuGGAGcAucucAucuTT B | 3221 |
| | | | | siNA stab07 | | |
| 3894 | UCACCUGUUUCCUGUAUGGAGGA | 2406 | 32766 | KDR:3894U21 sense | B AccuGuuuccuGuAuGGAGTT B | 3222 |
| | | | | siNA stab07 | | |
| 3304 | UGACCUUGGAGCAUCUCAUCUGU | 2405 | | KDR:3322L21 anti- | AGAuGAGAuGcuccAAGGuTsT | 3223 |
| | | | | sense siNA (3304C) | | |
| | | | | stab11 | | |
| 3854 | UUUGAGCAUGGAAGAGGAUUCUG | 2407 | | KDR:3872L21 anti- | GAAuccucuuccAuGcucATsT | 3224 |
| | | | | sense siNA (3854C) | | |
| | | | | stab11 | | |
| 3894 | UCACCUGUUUCCUGUAUGGAGGA | 2406 | | KDR:3912L21 anti- | cuccAuAcAGGAAAcAGGuTsT | 3225 |
| | | | | sense siNA (3894C) | | |
| | | | | stab11 | | |
| 3948 | GACAACACAGCAGGAAUCAGUCA | 2408 | | KDR:3966L21 anti- | AcuGAuuccuGcuGuGuuGTsT | 3226 |
| | | | | sense siNA (3948C) | | |
| | | | | stab11 | | |
| 3076 | UGUCCACUUACCUGAGGAGCAAG | 2409 | 30785 | KDR:3076U21 sense | B uccAcuuAccuGAGGAGcATT B | 3227 |
| | | | | siNA stab04 | | |
| 3854 | UUUGAGCAUGGAAGAGGAUUCUG | 2407 | 30786 | KDR:3854U21 sense | B uGAGcAuGGAAGAGGAuucTT B | 3228 |
| | | | | siNA stab04 | | |
| 4089 | AUGGUUCUUGCCUCAGAAGAGCU | 2410 | 30787 | KDR:4089U21 sense | B GGuucuuGccucAGAAGAGTT B | 3229 |
| | | | | siNA stab04 | | |
| 4191 | UCUGAAGGCUCAAACCAGACAAG | 2411 | 30788 | KDR:4191U21 sense | B uGAAGGcucAAAcoAGAcATT B | 3230 |
| | | | | siNA stab04 | | |
| 3076 | UGUCCACUUACCUGAGGAGCAAG | 2409 | 30789 | KDR:3094L21 anti- | uGcuccucAGGuAAGuGGATsT | 3231 |
| | | | | sense siNA (3076C) | | |
| | | | | stab05 | | |
| 3854 | UUUGAGCAUGGAAGAGGAUUCUG | 2407 | 30790 | KDR:3872L21 anti- | GAAuccucuuccAuGcucATsT | 3232 |
| | | | | sense siNA (3854C) | | |
| | | | | stab05 | | |
| 4089 | AUGGUUCUUGCCUCAGAAGAGCU | 2410 | 30791 | KDR:4107L21 anti- | cucuucuGAGGcAAGAAccTsT | 3233 |
| | | | | sense siNA (4089C) | | |
| | | | | stab05 | | |
| 4191 | UCUGAAGGCUCAAACCAGACAAG | 2411 | 30792 | KDR:4209L21 anti- | uGucuGGuuuGAGccuucATsT | 3234 |
| | | | | sense siNA (4191C) | | |
| | | | | stab05 | | |
| 3076 | UGUCCACUUACCUGAGGAGCAAG | 2409 | 31426 | KDR:3076U21 sense | UCCACUUACCUGAGGAGCATT | 3235 |
| | | | | siNA | | |
| 3854 | UUUGAGCAUGGAAGAGGAUUCUG | 2407 | 31435 | KDR:3854U21 sense | UGAGCAUGGAAGAGGAUUCTT | 3236 |
| | | | | siNA | | |
| 4089 | AUGGUUCUUGCCUCAGAAGAGCU | 2410 | 31428 | KDR:4089U21 sense | GGUUCUUGCCUCAGAAGAGTT | 3237 |
| | | | | siNA | | |
| 4191 | UCUGAAGGCUCAAACCAGACAAG | 2411 | 31429 | KDR:4191U21 sense | UGAAGGCUCAAACCAGACATT | 3238 |
| | | | | siNA | | |
| 3076 | UGUCCACUUACCUGAGGAGCAAG | 2409 | 31430 | KDR:3094L21 anti- | UGCUCCUCAGGUAAGUGGATT | 3239 |
| | | | | sense siNA (3076C) | | |
| 3854 | UUUGAGCAUGGAAGAGGAUUCUG | 2407 | 31439 | KDR:3872L21 anti- | GAAUCCUCUUCCAUGCUCATT | 3240 |
| | | | | sense siNA (3854C) | | |
| 4089 | AUGGUUCUUGCCUCAGAAGAGCU | 2410 | 31432 | KDR:4107L21 anti- | CUCUUCUGAGGCAAGAACCTT | 3241 |
| | | | | sense siNA (4089C) | | |
| 4191 | UCUGAAGGCUCAAACCAGACAAG | 2411 | 31433 | KDR:4209L21 anti- | UGUCUGGUUUGAGCCUUCATT | 3242 |
| | | | | sense siNA (4191C) | | |
| 3304 | UGACCUUGGAGCAUCUCAUCUGU | 2405 | 31434 | KDR:3304U21 sense | ACCUUGGAGCAUCUCAUCUTT | 3243 |
| | | | | siNA | | |
| 3894 | UCACCUGUUUCCUGUAUGGAGGA | 2406 | 31436 | KDR:3894U21 sense | ACCUGUUUCCUGUAUGGAGTT | 3244 |
| | | | | siNA | | |
| 3948 | GACAACACAGCAGGAAUCAGUCA | 2408 | 31437 | KDR:3948U21 sense | CAACACAGCAGGAAUCAGUU | 3245 |
| | | | | siNA | | |
| 3304 | UGACCUUGGAGCAUCUCAUCUGU | 2405 | 31438 | KDR:3322L21 anti- | AGAUGAGAUGCUCCAAGGUTT | 3246 |
| | | | | sense siNA (3304C) | | |
| 3894 | UCACCUGUUUCCUGUAUGGAGGA | 2406 | 31440 | KDR:3912L21 anti- | CUCCAUACAGGAAACAGGUTT | 3247 |
| | | | | sense siNA (3894C) | | |
| 3948 | GACAACACAGCAGGAAUCAGUCA | 2408 | 31441 | KDR:3966L21 anti- | ACUGAUUCCUGCUGUGUUGTT | 3248 |
| | | | | sense siNA (3948C) | | |
| 3948 | GACAACACAGCAGGAAUCAGUCA | 2408 | 31856 | KDR:3948U21 sense | B cAAcAcAGcAGGAAucAGuTT B | 3249 |
| | | | | siNA stab04 | | |
| 3948 | GACAACACAGCAGGAAUCAGUCA | 2408 | 31857 | KDR:3966L21 anti- | AcuGAuuccuGcuGuGuuGTsT | 3250 |
| | | | | sense siNA (3948C) | | |
| | | | | stab05 | | |
| 3854 | UUUGAGCAUGGAAGAGGAUUCUG | 2407 | 31858 | KDR:3854U21 sense | B uGAGcAuGGAAGAGGAuucTT B | 3251 |
| | | | | siNA stab07 | | |
| 3948 | GACAACACAGCAGGAAUCAGUCA | 2408 | 31859 | KDR:3948U21 sense | B cAAcAcAGcAGGAAucAGuTT B | 3252 |
| | | | | siNA stab07 | | |
| 3854 | UUUGAGCAUGGAAGAGGAUUCUG | 2407 | 31860 | KDR:3872L21 anti- | GAAuccucuuccAuGcucATsT | 3253 |
| | | | | sense siNA (3854C) | | |
| | | | | stab08 | | |
| 3948 | GACAACACAGCAGGAAUCAGUCA | 2408 | 31861 | KDR:3966L21 anti- | AcuGAuuccuGcuGuGuuGTsT | 3254 |
| | | | | sense siNA (3948C) | | |
| | | | | stab08 | | |
| 3854 | UUUGAGCAUGGAAGAGGAUUCUG | 2407 | 31862 | KDR:3854U21 sense | B UGAGCAUGGAAGAGGAUUCTT B | 3255 |
| | | | | siNA stab09 | | |
| 3948 | GACAACACAGCAGGAAUCAGUCA | 2408 | 31863 | KDR:3948U21 sense | B CAACACAGCAGGAAUCAGUTT B | 3256 |
| | | | | siNA stab09 | | |
| 3854 | UUUGAGCAUGGAAGAGGAUUCUG | 2407 | 31864 | KDR:3872L21 anti- | GAAUCCUCUUCCAUGCUCATsT | 3257 |
| | | | | sense siNA (3854C) | | |
| | | | | stab10 | | |
| 3948 | GACAACACAGCAGGAAUCAGUCA | 2408 | 31865 | KDR:3966L21 anti- | ACUGAUUCCUGCUGUGUUGTsT | 3258 |
| | | | | sense siNA (3948C) | | |
| | | | | stab10 | | |
| 3854 | UUUGAGCAUGGAAGAGGAUUCUG | 2407 | 31878 | KDR:3854U21 sense | B cuuAGGAGAAGGuAcGAGuTT B | 3259 |
| | | | | siNA inv stab04 | | |
| 3948 | GACAACACAGCAGGAAUCAGUCA | 2408 | 31879 | KDR:3948U21 sense | B uGAcuAAGGAcGAcAcAAcTT B | 3260 |
| | | | | siNA inv stab04 | | |
| 3854 | UUUGAGCAUGGAAGAGGAUUCUG | 2407 | 31880 | KDR:3872L21 anti- | AcucGuAccuucuccuAAGTsT | 3261 |
| | | | | sense siNA (3854C) | | |
| | | | | inv stab05 | | |
| 3948 | GACAACACAGCAGGAAUCAGUCA | 2408 | 31881 | KDR:3966L21 anti- | GuuGuGucGuccuuAGucATsT | 3262 |
| | | | | sense siNA (3948C) | | |
| | | | | inv stab05 | | |
| 3854 | UUUGAGCAUGGAAGAGGAUUCUG | 2407 | 31882 | KDR:3854U21 sense | B cuuAGGAGAAGGuAcGAGuTT B | 3263 |
| | | | | siNA inv stab07 | | |
| 3948 | GACAACACAGCAGGAAUCAGUCA | 2408 | 31883 | KDR:3948U21 sense | B uGAcuAAGGAcGAcAcAAcTT B | 3264 |
| | | | | siNA inv stab07 | | |
| 3854 | UUUGAGCAUGGAAGAGGAUUCUG | 2407 | 31884 | KDR:3872L21 anti- | AcucGuAccuucuccuAAGTsT | 3265 |
| | | | | sense siNA (3854C) | | |
| | | | | inv stab08 | | |
| 3948 | GACAACACAGCAGGAAUCAGUCA | 2408 | 31885 | KDR:3966L21 anti- | GuuGuGucGuccuuAGucATsT | 3266 |
| | | | | sense siNA (3948C) | | |
| | | | | inv stab08 | | |
| 3854 | UUUGAGCAUGGAAGAGGAUUCUG | 2407 | 31886 | KDR:3854U21 sense | B CUUAGGAGAAGGUACGAGUTT B | 3267 |
| | | | | siNA inv stab09 | | |
| 3948 | GACAACACAGCAGGAAUCAGUCA | 2408 | 31887 | KDR:3948U21 sense | B UGACUAAGGACGACACAACTT B | 3268 |
| | | | | siNA inv stab09 | | |
| 3854 | UUUGAGCAUGGAAGAGGAUUCUG | 2407 | 31888 | KDR:3872L21 anti- | ACUCGUACCUUCUCCUAAGTsT | 3269 |
| | | | | sense siNA (3854C) | | |
| | | | | inv stab10 | | |
| 3948 | GACAACACAGCAGGAAUCAGUCA | 2408 | 31889 | KDR:3966L21 anti- | GUUGUGUCGUCCUUAGUCATsT | 3270 |
| | | | | sense siNA (3948C) | | |
| | | | | inv stab10 | | |
| 2764 | CCUUAUGAUGCCAGCAAAU | 2412 | 32238 | KDR:2764U21 sense | CCUUAUGAUGCCAGCAAAUTT | 3271 |
| | | | | siNA | | |
| 2765 | CUUAUGAUGCCAGCAAAUG | 2413 | 32239 | KDR:2765U21 sense | CUUAUGAUGCCAGCAAAUGTT | 3272 |
| | | | | siNA | | |
| 2766 | UUAUGAUGCCAGCAAAUGG | 2414 | 32240 | KDR:2766U21 sense | UUAUGAUGCCAGCAAAUGGTT | 3273 |
| | | | | siNA | | |
| 2767 | UAUGAUGCCAGCAAAUGGG | 2415 | 32241 | KDR:2767U21 sense | UAUGAUGCCAGCAAAUGGGTT | 3274 |
| | | | | siNA | | |
| 2768 | AUGAUGCCAGCAAAUGGGA | 2416 | 32242 | KDR:2768U21 sense | AUGAUGCCAGCAAAUGGGATT | 3275 |
| | | | | siNA | | |
| 3712 | CAGACCAUGCUGGACUGCU | 2417 | 32243 | KDR:3712U21 sense | CAGACCAUGCUGGACUGCUTT | 3276 |
| | | | | siNA | | |
| 3713 | AGACCAUGCUGGACUGCUG | 2418 | 32244 | KDR:3713U21 sense | AGACCAUGCUGGACUGCUGTT | 3277 |
| | | | | siNA | | |
| 3714 | GACCAUGCUGGACUGCUGG | 2419 | 32245 | KDR:3714U21 sense | GACCAUGCUGGACUGCUGGTT | 3278 |
| | | | | siNA | | |
| 3715 | ACCAUGCUGGACUGCUGGC | 2420 | 32246 | KDR:3715U21 sense | ACCAUGCUGGACUGCUGGCTT | 3279 |
| | | | | siNA | | |
| 3716 | CCAUGCUGGACUGCUGGCA | 2421 | 32247 | KDR:3716U21 sense | CCAUGCUGGACUGCUGGCATT | 3280 |
| | | | | siNA | | |
| 3811 | CAGGAUGGCAAAGACUACA | 2422 | 32248 | KDR:3811U21 sense | CAGGAUGGCAAAGACUACATT | 3281 |
| | | | | siNA | | |
| 3812 | AGGAUGGCAAAGACUACAU | 2423 | 32249 | KDR:3812U21 sense | AGGAUGGCAAAGACUACAUTT | 3282 |
| | | | | siNA | | |
| 2764 | CCUUAUGAUGCCAGCAAAU | 2412 | 32253 | KDR:2782L21 anti- | AUUUGCUGGCAUCAUAAGGTT | 3283 |
| | | | | sense siNA (2764C) | | |
| 2765 | CUUAUGAUGCCAGCAAAUG | 2413 | 32254 | KDR:2783L21 anti- | CAUUUGCUGGCAUCAUAAGTT | 3284 |
| | | | | sense siNA (2765C) | | |
| 2766 | UUAUGAUGCCAGCAAAUGG | 2414 | 32255 | KDR:2784L21 anti- | CCAUUUGCUGGCAUCAUAATT | 3285 |
| | | | | sense siNA (2766C) | | |
| 2767 | UAUGAUGCCAGCAAAUGGG | 2415 | 32256 | KDR:2785L21 anti- | CCCAUUUGCUGGCAUCAUATT | 3286 |
| | | | | sense siNA (2767C) | | |
| 2768 | AUGAUGCCAGCAAAUGGGA | 2416 | 32257 | KDR:2786L21 anti- | UCCCAUUUGCUGGCAUCAUTT | 3287 |
| | | | | sense siNA (2768C) | | |
| 3712 | CAGACCAUGCUGGACUGCU | 2417 | 32258 | KDR:3730L21 anti- | AGCAGUCCAGCAUGGUCUGTT | 3288 |
| | | | | sense siNA (3712C) | | |
| 3713 | AGACCAUGCUGGACUGCUG | 2418 | 32259 | KDR:3731L21 anti- | CAGCAGUCCAGCAUGGUCUTT | 3289 |
| | | | | sense siNA (3713C) | | |
| 3714 | GACCAUGCUGGACUGCUGG | 2419 | 32260 | KDR:3732L21 anti- | CCAGCAGUCCAGCAUGGUCTT | 3290 |
| | | | | sense siNA (3714C) | | |
| 3715 | ACCAUGCUGGACUGCUGGC | 2420 | 32261 | KDR:3733L21 anti- | GCCAGCAGUCCAGCAUGGUTT | 3291 |
| | | | | sense siNA (3715C) | | |
| 3716 | CCAUGCUGGACUGCUGGCA | 2421 | 32262 | KDR:3734L21 anti- | UGCCAGCAGUCCAGCAUGGTT | 3292 |
| | | | | sense siNA (3716C) | | |
| 3811 | CAGGAUGGCAAAGACUACA | 2422 | 32263 | KDR:3829L21 anti- | UGUAGUCUUUGCCAUCCUGTT | 3293 |
| | | | | sense siNA (3811C) | | |
| 3812 | AGGAUGGCAAAGACUACAU | 2423 | 32264 | KDR:3830L21 anti- | AUGUAGUCUUUGCCAUCCUTT | 3294 |
| | | | | sense siNA (3812C) | | |
| 3304 | UGACCUUGGAGCAUCUCAUCUGU | 2405 | 32310 | KDR:3304U21 sense | B ACCUUGGAGCAUCUCAUCUTT B | 3295 |
| | | | | siNA stab09 | | |
| 3894 | UCACCUGUUUCCUGUAUGGAGGA | 2406 | 32311 | KDR:3894U21 sense | B ACCUGUUUCCUGUAUGGAGTT B | 3296 |
| | | | | siNA stab09 | | |
| 3304 | UGACCUUGGAGCAUCUCAUCUGU | 2405 | 32312 | KDR:3322L21 anti- | AGAUGAGAUGCUCCAAGGUTsT | 3297 |
| | | | | sense siNA (3304C) | | |
| | | | | stab10 | | |
| 3894 | UCACCUGUUUCCUGUAUGGAGGA | 2406 | 32313 | KDR:3912L21 anti- | CUCCAUACAGGAAACAGGUTsT | 3298 |
| | | | | sense siNA (3894C) | | |
| | | | | stab10 | | |
| 3304 | UGACCUUGGAGCAUCUCAUCUGU | 2405 | 32314 | KDR:3304U21 sense | B UCUACUCUACGAGGUUCCATT B | 3299 |
| | | | | siNA inv stab09 | | |
| 3894 | UCACCUGUUUCCUGUAUGGAGGA | 2406 | 32315 | KDR:3894U21 sense | B GAGGUAUGUCCUUUGUCCATT B | 3300 |
| | | | | siNA inv stab09 | | |
| 3304 | UGACCUUGGAGCAUCUCAUCUGU | 2405 | 32316 | KDR:3322L21 anti- | UGGAACCUCGUAGAGUAGATsT | 3301 |
| | | | | sense siNA (3304C) | | |
| | | | | inv stab10 | | |
| 3894 | UCACCUGUUUCCUGUAUGGAGGA | 2406 | 32317 | KDR:3912L21 anti- | UGGACAAAGGACAUACCUCTsT | 3302 |
| | | | | sense siNA (3894C) | | |
| | | | | inv stab10 | | |
| 828 | AACAGAAUUUCCUGGGACAGCAA | 2424 | 32762 | KDR:828U21 sense | B cAGAAuuuccuGGGAcAGcTT B | 3303 |
| | | | | siNA stab07 | | |
| 3310 | UGGAGCAUCUCAUCUGUUACAGC | 2425 | 32763 | KDR:3310U21 sense | B GAGcAucucAucuGuuAcATT B | 3304 |
| | | | | siNA stab07 | | |
| 3758 | CACGUUUUCAGAGUUGGUGGAAC | 2426 | 32764 | KDR:3758U21 sense | B cGuuuucAGAGuuGGuGGATT B | 3305 |
| | | | | siNA stab07 | | |
| 3893 | CUCACCUGUUUCCUGUAUGGAGG | 2427 | 32765 | KDR:3893U21 sense | B cAccuGuuuccuGuAuGGATT B | 3306 |
| | | | | siNA stab07 | | |
| 828 | AACAGAAUUUCCUGGGACAGCAA | 2424 | 32767 | KDR:846L21 anti- | GcuGucccAGGAAAuucuGTsT | 3307 |
| | | | | sense siNA (828C) | | |
| | | | | stab08 | | |
| 3310 | UGGAGCAUCUCAUCUGUUACAGC | 2425 | 32768 | KDR:3328L21 anti- | uGuAAcAGAuGAGAuGcucTsT | 3308 |
| | | | | sense siNA (3310C) | | |
| | | | | stab08 | | |
| 3758 | CACGUUUUCAGAGUUGGUGGAAC | 2426 | 32769 | KDR:3776L21 anti- | uccAccAAcucuGAAAAcGTsT | 3309 |
| | | | | sense siNA (3758C) | | |
| | | | | stab08 | | |
| 3893 | CUCACCUGUUUCCUGUAUGGAGG | 2427 | 32770 | KDR:3911L21 anti- | uccAuAcAGGAAAcAGGuGTsT | 3310 |
| | | | | sense siNA (3893C) | | |
| | | | | stab08 | | |
| 3894 | UCACCUGUUUCCUGUAUGGAGGA | 2406 | 32771 | KDR:3912L21 anti- | cuccAuAcAGGAAAcAGGuTsT | 3311 |
| | | | | sense siNA (3894C) | | |
| | | | | stab08 | | |
| 828 | AACAGAAUUUCCUGGGACAGCAA | 2424 | 32786 | KDR:828U21 sense | B cGAcAGGGuccuuuAAGAcTT B | 3312 |
| | | | | siNA inv stab07 | | |
| 3310 | UGGAGCAUCUCAUCUGUUACAGC | 2425 | 32787 | KDR:3310U21 sense | B AcAuuGucuAcucuAcGAGTT B | 3313 |
| | | | | siNA inv stab07 | | |
| 3758 | CACGUUUUCAGAGUUGGUGGAAC | 2426 | 32788 | KDR:3758U21 sense | B AGGuGGuuGAGAcuuuuGcTT B | 3314 |
| | | | | siNA inv stab07 | | |
| 3893 | CUCACCUGUUUCCUGUAUGGAGG | 2427 | 32789 | KDR:3893U21 sense | B AGGuAuGuccuuuGuccAcTT B | 3315 |
| | | | | siNA inv stab07 | | |
| 3894 | UCACCUGUUUCCUGUAUGGAGGA | 2406 | 32790 | KDR:3894U21 sense | B GAGGuAuGuccuuuGuccATT B | 3316 |
| | | | | siNA inv stab07 | | |
| 828 | AACAGAAUUUCCUGGGACAGCAA | 2424 | 32791 | KDR:846L21 anti- | GucuuAAAGGAcccuGucGTsT | 3317 |
| | | | | sense siNA (828C) | | |
| | | | | inv stab08 | | |
| 3310 | UGGAGCAUCUCAUCUGUUACAGC | 2425 | 32792 | KDR:3328L21 anti- | cucGuAGAGuAGAcAAuGuTsT | 3318 |
| | | | | sense siNA (3310C) | | |
| | | | | inv stab08 | | |
| 3758 | CACGUUUUCAGAGUUGGUGGAAC | 2426 | 32793 | KDR:3776L21 anti- | GcAAAAGucucAAccAccuTsT | 3319 |
| | | | | sense siNA (3758C) | | |
| | | | | inv stab08 | | |
| 3893 | CUCACCUGUUUCCUGUAUGGAGG | 2427 | 32794 | KDR:3911L21 anti- | GuGGAcAAAGGAcAuAccuTsT | 3320 |
| | | | | sense siNA (3893C) | | |
| | | | | inv stab08 | | |
| 3894 | UCACCUGUUUCCUGUAUGGAGGA | 2406 | 32795 | KDR:3912L21 anti- | uGGAcAAAGGAcAuAccucTsT | 3321 |
| | | | | sense siNA (3894C) | | |
| | | | | inv stab08 | | |
| 828 | AACAGAAUUUCCUGGGACAGCAA | 2424 | 32958 | KDR:828U21 sense | B CAGAAUUUCCUGGGACAGCTT B | 3322 |
| | | | | siNA stab09 | | |
| 3310 | UGGAGCAUCUCAUCUGUUACAGC | 2425 | 32959 | KDR:3310U21 sense | B GAGCAUCUCAUCUGUUACATT B | 3323 |
| | | | | siNA stab09 | | |
| 3758 | CACGUUUUCAGAGUUGGUGGAAC | 2426 | 32960 | KDR:3758U21 sense | B CGUUUUCAGAGUUGGUGGATT B | 3324 |
| | | | | siNA stab09 | | |
| 3893 | CUCACCUGUUUCCUGUAUGGAGG | 2427 | 32961 | KDR:3893U21 sense | B CACCUGUUUCCUGUAUGGATT B | 3325 |
| | | | | siNA stab09 | | |
| 828 | AACAGAAUUUCCUGGGACAGCAA | 2424 | 32963 | KDR:846L21 anti- | GCUGUCCCAGGAAAUUCUGTsT | 3326 |
| | | | | sense siNA (828C) | | |
| | | | | stab10 | | |
| 3310 | UGGAGCAUCUCAUCUGUUACAGC | 2425 | 32964 | KDR:3328L21 anti- | UGUAACAGAUGAGAUGCUCTsT | 3327 |
| | | | | sense siNA (3310C) | | |
| | | | | stab10 | | |
| 3758 | CACGUUUUCAGAGUUGGUGGAAC | 2426 | 32965 | KDR:3776L21 anti- | UCCACCAACUCUGAAAACGTsT | 3328 |
| | | | | sense siNA (3758C) | | |
| | | | | stab10 | | |
| 3893 | CUCACCUGUUUCCUGUAUGGAGG | 2427 | 32966 | KDR:3911L21 anti- | UCCAUACAGGAAACAGGUGTsT | 3329 |
| | | | | sense siNA (3893C) | | |
| | | | | stab10 | | |
| 828 | AACAGAAUUUCCUGGGACAGCAA | 2424 | 32988 | KDR:828U21 sense | B CGACAGGGUCCUUUAAGACTT B | 3330 |
| | | | | siNA inv stab09 | | |
| 3310 | UGGAGCAUCUCAUCUGUUACAGC | 2425 | 32989 | KDR:3310U21 sense | B ACAUUGUCUACUCUACGAGTT B | 3331 |
| | | | | siNA inv stab09 | | |
| 3758 | CACGUUUUCAGAGUUGGUGGAAC | 2426 | 32990 | KDR:3758U21 sense | B AGGUGGUUGAGACUUUUGCTT B | 3332 |
| | | | | siNA inv stab09 | | |
| 3893 | CUCACCUGUUUCCUGUAUGGAGG | 2427 | 32991 | KDR:3893U21 sense | B AGGUAUGUCCUUUGUCCACTT B | 3333 |
| | | | | siNA inv stab09 | | |
| 828 | AACAGAAUUUCCUGGGACAGCAA | 2424 | 32993 | KDR:846L21 anti- | GUCUUAAAGGACCCUGUCGTsT | 3334 |
| | | | | sense siNA (828C) | | |
| | | | | inv stab10 | | |
| 3310 | UGGAGCAUCUCAUCUGUUACAGC | 2425 | 32994 | KDR:3328L21 anti- | CUCGUAGAGUAGACAAUGUTsT | 3335 |
| | | | | sense siNA (3310C) | | |
| | | | | inv stab10 | | |
| 3758 | CACGUUUUCAGAGUUGGUGGAAC | 2426 | 32995 | KDR:3776L21 anti- | GCAAAAGUCUCAACCACCUTsT | 3336 |
| | | | | sense siNA (3758C) | | |
| | | | | inv stab10 | | |
| 3893 | CUCACCUGUUUCCUGUAUGGAGG | 2427 | 32996 | KDR:3911L21 anti- | GUGGACAAAGGACAUACCUTsT | 3337 |
| | | | | sense siNA (3893C) | | |
| | | | | inv stab10 | | |
| 2767 | CUUAUGAUGCCAGCAAAUGGGAA | 2218 | 33727 | KDR:2767U21 sense | B uAuGAuGccAGcAAAuGGGTT B | 3338 |
| | | | | siNA stab07 | | |
| 2768 | UUAUGAUGCCAGCAAAUGGGAAU | 2222 | 33728 | KDR:2768U21 sense | B AuGAuGccAGcAAAuGGGATT B | 3339 |
| | | | | siNA stab07 | | |
| 3715 | AGACCAUGCUGGACUGCUGGCAC | 2241 | 33729 | KDR:3715U21 sense | B AccAuGcuGGAcuGcuGGcTT B | 3340 |
| | | | | siNA stab07 | | |
| 3716 | GACCAUGCUGGACUGCUGGCACG | 2247 | 33730 | KDR:3716U21 sense | B ccAuGcuGGAcuGcuGGcATT B | 3341 |
| | | | | siNA stab07 | | |
| 2767 | CUUAUGAUGCCAGCAAAUGGGAA | 2218 | 33733 | KDR:2785L21 anti- | cccAuuuGcuGGcAucAuATsT | 3342 |
| | | | | sense siNA (2767C) | | |
| | | | | stab08 | | |
| 2768 | UUAUGAUGCCAGCAAAUGGGAAU | 2222 | 33734 | KDR:2786L21 anti- | ucccAuuuGcuGGcAucAuTsT | 3343 |
| | | | | sense siNA (2768C) | | |
| | | | | stab08 | | |
| 3715 | AGACCAUGCUGGACUGCUGGCAC | 2241 | 33735 | KDR:3733L21 anti- | GccAGcAGuccAGcAuGGuTsT | 3344 |
| | | | | sense siNA (3715C) | | |
| | | | | stab08 | | |
| 3716 | GACCAUGCUGGACUGCUGGCACG | 2247 | 33736 | KDR:3734L21 anti- | uGccAGcAGuccAGcAuGGTsT | 3345 |
| | | | | sense siNA (3716C) | | |
| | | | | stab08 | | |
| 2767 | CUUAUGAUGCCAGCAAAUGGGAA | 2218 | 33739 | KDR:2767U21 sense | B UAUGAUGCCAGCAAAUGGGTT B | 3346 |
| | | | | siNA stab09 | | |
| 2768 | UUAUGAUGCCAGCAAAUGGGAAU | 2222 | 33740 | KDR:2768U21 sense | B AUGAUGCCAGCAAAUGGGATT B | 3347 |
| | | | | siNA stab09 | | |
| 3715 | AGACCAUGCUGGACUGCUGGCAC | 2241 | 33741 | KDR:3715U21 sense | B ACCAUGCUGGACUGCUGGCTT B | 3348 |
| | | | | siNA stab09 | | |
| 3716 | GACCAUGCUGGACUGCUGGCACG | 2247 | 33742 | KDR:3716U21 sense | B CCAUGCUGGACUGCUGGCATT B | 3349 |
| | | | | siNA stab09 | | |
| 2767 | CUUAUGAUGCCAGCAAAUGGGAA | 2218 | 33745 | KDR:2785L21 anti- | CCCAUUUGCUGGCAUCAUATsT | 3350 |
| | | | | sense siNA (2767C) | | |
| | | | | stab10 | | |
| 2768 | UUAUGAUGCCAGCAAAUGGGAAU | 2222 | 33746 | KDR:2786L21 anti- | UCCCAUUUGCUGGCAUCAUTsT | 3351 |
| | | | | sense siNA (2768C) | | |
| | | | | stab10 | | |
| 3715 | AGACCAUGCUGGACUGCUGGCAC | 2241 | 33747 | KDR:3733L21 anti- | GCCAGCAGUCCAGCAUGGUTsT | 3352 |
| | | | | sense siNA (3715C) | | |
| | | | | stab10 | | |
| 3716 | GACCAUGCUGGACUGCUGGCACG | 2247 | 33748 | KDR:3734L21 anti- | UGCCAGCAGUCCAGCAUGGTsT | 3353 |
| | | | | sense siNA (3716C) | | |
| | | | | stab10 | | |
| 2767 | CUUAUGAUGCCAGCAAAUGGGAA | 2218 | 33751 | KDR:2767U21 sense | B GGGuAAAcGAccGuAGuAuTT B | 3354 |
| | | | | siNA inv stab07 | | |
| 2768 | UUAUGAUGCCAGCAAAUGGGAAU | 2222 | 33752 | KDR:2768U21 sense | B AGGGuAAAcGAccGuAGuATT B | 3355 |
| | | | | siNA inv stab07 | | |
| 3715 | AGACCAUGCUGGACUGCUGGCAC | 2241 | 33753 | KDR:3715U21 sense | B cGGucGucAGGucGuAccATT B | 3356 |
| | | | | siNA inv stab07 | | |
| 3716 | GACCAUGCUGGACUGCUGGCACG | 2247 | 33754 | KDR:3716U21 sense | B AcGGucGucAGGucGuAccTT B | 3357 |
| | | | | siNA inv stab07 | | |
| 2767 | CUUAUGAUGCCAGCAAAUGGGAA | 2218 | 33757 | KDR:2785L21 anti- | AuAcuAcGGucGuuuAcccTsT | 3358 |
| | | | | sense siNA (2767C) | | |
| | | | | inv stab08 | | |
| 2768 | UUAUGAUGCCAGCAAAUGGGAAU | 2222 | 33758 | KDR:2786L21 anti- | uAcuAcGGucGuuuAcccuTsT | 3359 |
| | | | | sense siNA (2768C) | | |
| | | | | inv stab08 | | |
| 3715 | AGACCAUGCUGGACUGCUGGCAC | 2241 | 33759 | KDR:3733L21 anti- | uGGuAcGAccuGAcGAccGTsT | 3360 |
| | | | | sense siNA (3715C) | | |
| | | | | inv stab08 | | |
| 3716 | GACCAUGCUGGACUGCUGGCACG | 2247 | 33760 | KDR:3734L21 anti- | GGuAcGAccuGAcGAccGuTsT | 3361 |
| | | | | sense siNA (3716C) | | |
| | | | | inv stab08 | | |
| 2767 | CUUAUGAUGCCAGCAAAUGGGAA | 2218 | 33763 | KDR:2767U21 sense | B GGGUAAACGACCGUAGUAUTT B | 3362 |
| | | | | siNA inv stab09 | | |
| 2768 | UUAUGAUGCCAGCAAAUGGGAAU | 2222 | 33764 | KDR:2768U21 sense | B AGGGUAAACGACCGUAGUATT B | 3363 |
| | | | | siNA inv stab09 | | |
| 3715 | AGACCAUGCUGGACUGCUGGCAC | 2241 | 33765 | KDR:3715U21 sense | B CGGUCGUCAGGUCGUACCATT B | 3364 |
| | | | | siNA inv stab09 | | |
| 3716 | GACCAUGCUGGACUGCUGGCACG | 2247 | 33766 | KDR:3716U21 sense | B ACGGUCGUCAGGUCGUACCTT B | 3365 |
| | | | | siNA inv stab09 | | |
| 2767 | CUUAUGAUGCCAGCAAAUGGGAA | 2218 | 33769 | KDR:2785L21 anti- | AUACUACGGUCGUUUACCCTsT | 3366 |
| | | | | sense siNA (2767C) | | |
| | | | | inv stab10 | | |
| 2768 | UUAUGAUGCCAGCAAAUGGGAAU | 2222 | 33770 | KDR:2786L21 anti- | UACUACGGUCGUUUACCCUTsT | 3367 |
| | | | | sense siNA (2768C) | | |
| | | | | inv stab10 | | |
| 3715 | AGACCAUGCUGGACUGCUGGCAC | 2241 | 33771 | KDR:3733L21 anti- | UGGUACGACCUGACGACCGTsT | 3368 |
| | | | | sense siNA (3715C) | | |
| | | | | inv stab10 | | |
| 3716 | GACCAUGCUGGACUGCUGGCACG | 2247 | 33772 | KDR:3734L21 anti- | GGUACGACCUGACGACCGUTsT | 3369 |
| | | | | sense smNA (3716C) | | |
| | | | | inv stab10 | | |
| 3715 | AGACCAUGCUGGACUGCUGGCAC | 2241 | 34502 | KDR:3733L21 anti- | GccAGcAGuccAGcAuGGuTTB | 3370 |
| | | | | sense smNA (3715C) | | |
| | | | | stab19 | | |
| 3715 | AGACCAUGCUGGACUGCUGGCAC | 2241 | 34503 | KDR:3733L21 anti- | GccAGcAGuccAGcAuGGU | 3371 |
| | | | | sense siNA (3715C) | | |
| | | | | stab08 Blunt | | |
| 3715 | AGACCAUGCUGGACUGCUGGCAC | 2241 | 34504 | KDR:3733L21 anti- | uGGuAcGAccuGAcGAccGTTB | 3372 |
| | | | | sense smNA (3715C) | | |
| | | | | inv stab19 | | |
| 3715 | AGACCAUGCUGGACUGCUGGCAC | 2241 | 34505 | KDR:3733L21 anti- | uGGuAcGAccuGAcGAccG | 3373 |
| | | | | sense siNA (3715C) | | |
| | | | | inv stab08 Blunt | | |
| 503 | UCAGAGUGGCAGUGAGCAAAGGG | 2428 | 34680 | KDR:503U21 sense | AGAGUGGCAGUGAGCAAAGTT | 3374 |
| | | | | siNA stab00 | | |
| 503 | UCAGAGUGGCAGUGAGCAAAGGG | 2428 | 34688 | KDR:521L21 (503C) | CUUUGCUCACUGCCACUCUTT | 3375 |
| | | | | siRNA stab00 | | |
| 3715 | AGACCAUGCUGGACUGCUGGCAC | 2241 | 35124 | KDR:3715U21 sense | B AccAuGcuGGAcuGcuGGcTT B | 3376 |
| | | | | siNA stab04 | | |
| 3715 | AGACCAUGCUGGACUGCUGGCAC | 2241 | 35125 | KDR:3715U21 sense | B AccAuGcuGGAcuGCUGGCTT B | 3377 |
| | | | | siNA stab07 N1 | | |
| 3715 | AGACCAUGCUGGACUGCUGGCAC | 2241 | 35126 | KDR:3733L21 anti- | GCCAGCAGuccAGcAuGGuTsT | 3378 |
| | | | | sense siNA (3715C) | | |
| | | | | stab08 N1 | | |
| 3715 | AGACCAUGCUGGACUGCUGGCAC | 2241 | 35127 | KDR:3733L21 anti- | GCCAGcAGuccAGcAuGGuTsT | 3379 |
| | | | | sense siNA (3715C) | | |
| | | | | stab08 N2 | | |
| 3715 | AGACCAUGCUGGACUGCUGGCAC | 2241 | 35128 | KDR:3733L21 anti- | GCCAGcAGuccAGcAuGGuTsT | 3380 |
| | | | | sense siNA (3715C) | | |
| | | | | stab08 N3 | | |
| 3715 | AGACCAUGCUGGACUGCUGGCAC | 2241 | 35129 | KDR:3733L21 anti- | GCCAGcAGuccAGcAuGGuTsT | 3381 |
| | | | | sense siNA (3715C) | | |
| | | | | stab25 | | |
| 3715 | AGACCAUGCUGGACUGCUGGCAC | 2241 | 35130 | KDR:3733L21 anti- | GCcAGcAGuccAGcAuGGuTsT | 3382 |
| | | | | sense siNA (3715C) | | |
| | | | | stab08 N5 | | |
| 3715 | AGACCAUGCUGGACUGCUGGCAC | 2241 | 35131 | KDR:3733L21 anti- | GccAGcAGuccAGcAuGGuTsT | 3383 |
| | | | | sense siNA (3715C) | | |
| | | | | stab24 | | |
| 83 | CCGCAGAAAGUCCGUCUGGCAGC | 2429 | 36280 | KDR:83U21 sense siNA | GCAGAAAGUCCGUCUGGCATT | 3384 |
| | | | | stab00 | | |
| 84 | CGCAGAAAGUCCGUCUGGCAGCC | 2430 | 36281 | KDR:84U21 sense siNA | CAGAAAGUCCGUCUGGCAGTT | 3385 |
| | | | | stab00 | | |
| 85 | GCAGAAAGUCCGUCUGGCAGCCU | 2431 | 36282 | KDR:85U21 sense siNA | AGAAAGUCCGUCUGGCAGCTT | 3386 |
| | | | | stab00 | | |
| 99 | UGGCAGCCUGGAUAUCCUCUCCU | 2432 | 36283 | KDR:99U21 sense siNA | GCAGCCUGGAUAUCCUCUCTT | 3387 |
| | | | | stab00 | | |
| 100 | GGCAGCCUGGAUAUCCUCUCCUA | 2433 | 36284 | KDR:100U21 sense siNA | CAGCCUGGAUAUCCUCUCCTT | 3388 |
| | | | | stab00 | | |
| 161 | CCCGGGCUCCCUAGCCCUGUGCG | 2434 | 36285 | KDR:161U21 sense siNA | CGGGCUCCCUAGCCCUGUGTT | 3389 |
| | | | | stab00 | | |
| 162 | CCGGGCUCCCUAGCCCUGUGCGC | 2435 | 36286 | KDR:162U21 sense siNA | GGGCUCCCUAGCCCUGUGCTT | 3390 |
| | | | | stab00 | | |
| 229 | CCUCCUUCUCUAGACAGGCGCUG | 2436 | 36287 | KDR:229U21 sense siNA | UCCUUCUCUAGACAGGCGCTT | 3391 |
| | | | | stab00 | | |
| 230 | CUCCUUCUCUAGACAGGCGCUGG | 2437 | 36288 | KDR:230U21 sense siNA | CCUUCUCUAGACAGGCGCUTT | 3392 |
| | | | | stab00 | | |
| 231 | UCCUUCUCUAGACAGGCGCUGGG | 2438 | 36289 | KDR:231U21 sense siNA | CUUCUCUAGACAGGCGCUGTT | 3393 |
| | | | | stab00 | | |
| 522 | AGGGUGGAGGUGACUGAGUGCAG | 2439 | 36290 | KDR:522U21 sense siNA | GGUGGAGGUGACUGAGUGCTT | 3394 |
| | | | | stab00 | | |
| 523 | GGGUGGAGGUGACUGAGUGCAGC | 2440 | 36291 | KDR:523U21 sense siNA | GUGGAGGUGACUGAGUGCATT | 3395 |
| | | | | stab00 | | |
| 888 | GCUGGCAUGGUCUUCUGUGAAGC | 2441 | 36292 | KDR:888U21 sense siNA | UGGCAUGGUCUUCUGUGAATT | 3396 |
| | | | | stab00 | | |
| 889 | CUGGCAUGGUCUUCUGUGAAGCA | 2442 | 36293 | KDR:889U21 sense siNA | GGCAUGGUCUUCUGUGAAGTT | 3397 |
| | | | | stab00 | | |
| 905 | UGAAGCAAAAAUUAAUGAUGAAA | 2443 | 36294 | KDR:905U21 sense siNA | AAGCAAAAAUUAAUGAUGATT | 3398 |
| | | | | stab00 | | |
| 906 | GAAGCAAAAAUUAAUGAUGAAAG | 2444 | 36295 | KDR:906U21 sense siNA | AGCAAAAAUUAAUGAUGAATT | 3399 |
| | | | | stab00 | | |
| 1249 | CCAAGAAGAACAGCACAUUUGUC | 2445 | 36296 | KDR:1249U21 sense siNA | AAGAAGAACAGCACAUUUGTT | 3400 |
| | | | | stab00 | | |
| 1260 | AGCACAUUUGUCAGGGUCCAUGA | 2446 | 36297 | KDR:1260U21 sense siNA | CACAUUUGUCAGGGUCCAUTT | 3401 |
| | | | | stab00 | | |
| 1305 | AGUGGCAUGGAAUCUCUGGUGGA | 2447 | 36298 | KDR:1305U21 sense siNA | UGGCAUGGAAUCUCUGGUGTT | 3402 |
| | | | | stab00 | | |
| 1315 | AAUCUCUGGUGGAAGCCACGGUG | 2448 | 36299 | KDR:1315U21 sense siNA | UCUCUGGUGGAAGCCACGGTT | 3403 |
| | | | | stab00 | | |
| 1541 | GGUCUCUCUGGUUGUGUAUGUCC | 2449 | 36300 | KDR:1541U21 sense siNA | UCUCUCUGGUUGUGUAUGUTT | 3404 |
| | | | | stab00 | | |
| 1542 | GUCUCUCUGGUUGUGUAUGUCCC | 2450 | 36301 | KDR:1542U21 sense siNA | CUCUCUGGUUGUGUAUGUCTT | 3405 |
| | | | | stab00 | | |
| 1588 | UAAUCUCUCCUGUGGAUUCCUAC | 2451 | 36302 | KDR:1588U21 sense siNA | AUCUCUCCUGUGGAUUCCUTT | 3406 |
| | | | | stab00 | | |
| 1589 | AAUCUCUCCUGUGGAUUCCUACC | 2452 | 36303 | KDR:1589U21 sense siNA | UCUCUCCUGUGGAUUCCUATT | 3407 |
| | | | | stab00 | | |
| 1875 | GUGUCAGCUUUGUACAAAUGUGA | 2453 | 36304 | KDR:1875U21 sense siNA | GUCAGCUUUGUACAAAUGUTT | 3408 |
| | | | | stab00 | | |
| 2874 | GACAAGACAGCAACUUGCAGGAC | 2454 | 36305 | KDR:2874U21 sense siNA | CAAGACAGCAACUUGCAGGTT | 3409 |
| | | | | stab00 | | |
| 2875 | ACAAGACAGCAACUUGCAGGACA | 2455 | 36306 | KDR:2875U21 sense siNA | AAGACAGCAACUUGCAGGATT | 3410 |
| | | | | stab00 | | |
| 2876 | CAAGACAGCAACUUGCAGGACAG | 2456 | 36307 | KDR:2876U21 sense siNA | AGACAGCAACUUGCAGGACTT | 3411 |
| | | | | stab00 | | |
| 3039 | CUCAUGGUGAUUGUGGAAUUCUG | 2457 | 36308 | KDR:3039U21 sense siNA | CAUGGUGAUUGUGGAAUUCTT | 3412 |
| | | | | stab00 | | |
| 3040 | UCAUGGUGAUUGUGGAAUUCUGC | 2458 | 36309 | KDR:3040U21 sense siNA | AUGGUGAUUGUGGAAUUCUTT | 3413 |
| | | | | stab00 | | |
| 3249 | UCCCUCAGUGAUGUAGAAGAAGA | 2459 | 36310 | KDR:3249U21 sense siNA | CCUCAGUGAUGUAGAAGAATT | 3414 |
| | | | | stab00 | | |
| 3263 | AGAAGAAGAGGAAGCUCCUGAAG | 2460 | 36311 | KDR:3263U21 sense siNA | AAGAAGAGGAAGCUCCUGATT | 3415 |
| | | | | stab00 | | |
| 3264 | GAAGAAGAGGAAGCUCCUGAAGA | 2461 | 36312 | KDR:3264U21 sense siNA | AGAAGAGGAAGCUCCUGAATT | 3416 |
| | | | | stab00 | | |
| 3269 | AGAGGAAGCUCCUGAAGAUCUGU | 2462 | 36313 | KDR:3269U21 sense siNA | AGGAAGCUCCUGAAGAUCUTT | 3417 |
| | | | | stab00 | | |
| 3270 | GAGGAAGCUCCUGAAGAUCUGUA | 2463 | 36314 | KDR:3270U21 sense siNA | GGAAGCUCCUGAAGAUCUGTT | 3418 |
| | | | | stab00 | | |
| 3346 | AGGGCAUGGAGUUCUUGGCAUCG | 2464 | 36315 | KDR:3346U21 sense siNA | GGCAUGGAGUUCUUGGCAUTT | 3419 |
| | | | | stab00 | | |
| 3585 | UUGCUGUGGGAAAUAUUUUCCUU | 2465 | 36316 | KDR:3585U21 sense siNA | GCUGUGGGAAAUAUUUUCCTT | 3420 |
| | | | | stab00 | | |
| 3586 | UGCUGUGGGAAAUAUUUUCCUUA | 2466 | 36317 | KDR:3586U21 sense siNA | CUGUGGGAAAUAUUUUCCUTT | 3421 |
| | | | | stab00 | | |
| 3860 | CAUGGAAGAGGAUUCUGGACUCU | 2467 | 36318 | KDR:3860U21 sense siNA | UGGAAGAGGAUUCUGGACUTT | 3422 |
| | | | | stab00 | | |
| 3877 | GACUCUCUCUGCCUACCUCACCU | 2468 | 36319 | KDR:3877U21 sense siNA | CUCUCUCUGCCUACCUCACTT | 3423 |
| | | | | stab00 | | |
| 3878 | ACUCUCUCUGCCUACCUCACCUG | 2469 | 36320 | KDR:3878U21 sense siNA | UCUCUCUGCCUACCUCACCTT | 3424 |
| | | | | stab00 | | |
| 4287 | AAGCUGAUAGAGAUUGGAGUGCA | 2470 | 36321 | KDR:4287U21 sense siNA | GCUGAUAGAGAUUGGAGUGTT | 3425 |
| | | | | stab00 | | |
| 4288 | AGCUGAUAGAGAUUGGAGUGCAA | 2471 | 36322 | KDR:4288U21 sense siNA | CUGAUAGAGAUUGGAGUGCTT | 3426 |
| | | | | stab00 | | |
| 4318 | GCACAGCCCAGAUUCUCCAGCCU | 2472 | 36323 | KDR:4318U21 sense siNA | ACAGCCCAGAUUCUCCAGCTT | 3427 |
| | | | | stab00 | | |
| 4319 | CACAGCCCAGAUUCUCCAGCCUG | 2473 | 36324 | KDR:4319U21 sense siNA | CAGCCCAGAUUCUCCAGCCTT | 3428 |
| | | | | stab00 | | |
| 4320 | ACAGCCCAGAUUCUCCAGCCUGA | 2474 | 36325 | KDR:4320U21 sense siNA | AGCCCAGAUUCUCCAGCCUTT | 3429 |
| | | | | stab00 | | |
| 4321 | CAGCCCAGAUUCUCCAGCCUGAC | 2475 | 36326 | KDR:4321U21 sense siNA | GCCCAGAUUCUCCAGCCUGTT | 3430 |
| | | | | stab00 | | |
| 4359 | AGCUCUCCUCCUGUUUAAAAGGA | 2476 | 36327 | KDR:4359U21 sense siNA | CUCUCCUCCUGUUUAAAAGTT | 3431 |
| | | | | stab00 | | |
| 4534 | UAUCCUGGAAGAGGCUUGUGACC | 2477 | 36328 | KDR:4534U21 sense siNA | UCCUGGAAGAGGCUUGUGATT | 3432 |
| | | | | stab00 | | |
| 4535 | AUCCUGGAAGAGGCUUGUGACCC | 2478 | 36329 | KDR:4535U21 sense siNA | CCUGGAAGAGGCUUGUGACTT | 3433 |
| | | | | stab00 | | |
| 4536 | UCCUGGAAGAGGCUUGUGACCCA | 2479 | 36330 | KDR:4536U21 sense siNA | CUGGAAGAGGCUUGUGACCTT | 3434 |
| | | | | stab00 | | |
| 4539 | UGGAAGAGGCUUGUGACCCAAGA | 2480 | 36331 | KDR:4539U21 sense siNA | GAAGAGGCUUGUGACCCAATT | 3435 |
| | | | | stab00 | | |
| 4769 | UGUUGAAGAUGGGAAGGAUUUGC | 2481 | 36332 | KDR:4769U21 sense siNA | UUGAAGAUGGGAAGGAUUUTT | 3436 |
| | | | | stab00 | | |
| 4934 | UCUGGUGGAGGUGGGCAUGGGGU | 2482 | 36333 | KDR:4934U21 sense siNA | UGGUGGAGGUGGGCAUGGGTT | 3437 |
| | | | | stab00 | | |
| 5038 | UCGUUGUGCUGUUUCUGACUCCU | 2483 | 36334 | KDR:5038U21 sense siNA | GUUGUGCUGUUUCUGACUCTT | 3438 |
| | | | | stab00 | | |
| 5039 | CGUUGUGCUGUUUCUGACUCCUA | 2484 | 36335 | KDR:5039U21 sense siNA | UUGUGCUGUUUCUGACUCCTT | 3439 |
| | | | | stab00 | | |
| 5040 | GUUGUGCUGUUUCUGACUCCUAA | 2485 | 36336 | KDR:5040U21 sense siNA | UGUGCUGUUUCUGACUCCUTT | 3440 |
| | | | | stab00 | | |
| 5331 | UCAAAGUUUCAGGAAGGAUUUUA | 2486 | 36337 | KDR:5331U21 sense siNA | AAAGUUUCAGGAAGGAUUUTT | 3441 |
| | | | | stab00 | | |
| 5332 | CAAAGUUUCAGGAAGGAUUUUAC | 2487 | 36338 | KDR:5332U21 sense siNA | AAGUUUCAGGAAGGAUUUUTT | 3442 |
| | | | | stab00 | | |
| 5333 | AAAGUUUCAGGAAGGAUUUUACC | 2488 | 36339 | KDR:5333U21 sense siNA | AGUUUCAGGAAGGAUUUUATT | 3443 |
| | | | | stab00 | | |
| 5587 | UCAAAAAAGAAAAUGUGUUUUUU | 2489 | 36340 | KDR:5587U21 sense siNA | AAAAAAGAAAAUGUGUUUUTT | 3444 |
| | | | | stab00 | | |
| 5737 | CUAUUCACAUUUUGUAUCAGUAU | 2490 | 36341 | KDR:5737U21 sense siNA | AUUCACAUUUUGUAUCAGUTT | 3445 |
| | | | | stab00 | | |
| 5738 | UAUUCACAUUUUGUAUCAGUAUU | 2491 | 36342 | KDR:5738U21 sense siNA | UUCACAUUUUGUAUCAGUATT | 3446 |
| | | | | stab00 | | |
| 5739 | AUUCACAUUUUGUAUCAGUAUUA | 2492 | 36343 | KDR:5739U21 sense siNA | UCACAUUUUGUAUCAGUAUTT | 3447 |
| | | | | stab00 | | |
| 83 | CCGCAGAAAGUCCGUCUGGCAGC | 2429 | 36344 | KDR:101L21 anti- | UGCCAGACGGACUUUCUGCTT | 3448 |
| | | | | sense siNA (83C) | | |
| | | | | stab00 | | |
| 84 | CGCAGAAAGUCCGUCUGGCAGCC | 2430 | 36345 | KDR:102L21 anti- | CUGCCAGACGGACUUUCUGTT | 3449 |
| | | | | sense siNA (84C) | | |
| | | | | stab00 | | |
| 85 | GCAGAAAGUCCGUCUGGCAGCCU | 2431 | 36346 | KDR:103L21 anti- | GCUGCCAGACGGACUUUCUTT | 3450 |
| | | | | sense siNA (85C) | | |
| | | | | stab00 | | |
| 99 | UGGCAGCCUGGAUAUCCUCUCCU | 2432 | 36347 | KDR:117L21 anti- | GAGAGGAUAUCCAGGCUGCTT | 3451 |
| | | | | sense siNA (99C) | | |
| | | | | stab00 | | |
| 100 | GGCAGCCUGGAUAUCCUCUCCUA | 2433 | 36348 | KDR:118L21 anti- | GGAGAGGAUAUCCAGGCUGTT | 3452 |
| | | | | sense siNA (100C) | | |
| | | | | stab00 | | |
| 161 | CCCGGGCUCCCUAGCCCUGUGCG | 2434 | 36349 | KDR:179L21 anti- | CACAGGGCUAGGGAGCCCGTT | 3453 |
| | | | | sense siNA (161C) | | |
| | | | | stab00 | | |
| 162 | CCGGGCUCCCUAGCCCUGUGCGC | 2435 | 36350 | KDR:180L21 anti- | GCACAGGGCUAGGGAGCCCTT | 3454 |
| | | | | sense siNA (162C) | | |
| | | | | stab00 | | |
| 229 | CCUCCUUCUCUAGACAGGCGCUG | 2436 | 36351 | KDR:247L21 anti- | GCGCCUGUCUAGAGAAGGATT | 3455 |
| | | | | sense siNA (229C) | | |
| | | | | stab00 | | |
| 230 | CUCCUUCUCUAGACAGGCGCUGG | 2437 | 36352 | KDR:248L21 anti- | AGCGCCUGUCUAGAGAAGGTT | 3456 |
| | | | | sense siNA (230C) | | |
| | | | | stab00 | | |
| 231 | UCCUUCUCUAGACAGGCGCUGGG | 2438 | 36353 | KDR:249L21 anti- | CAGCGCCUGUCUAGAGAAGTT | 3457 |
| | | | | sense siNA (231C) | | |
| | | | | stab00 | | |
| 522 | AGGGUGGAGGUGACUGAGUGCAG | 2439 | 36354 | KDR:540L21 anti- | GCACUCAGUCACCUCCACCTT | 3458 |
| | | | | sense siNA (522C) | | |
| | | | | stab00 | | |
| 523 | GGGUGGAGGUGACUGAGUGCAGC | 2440 | 36355 | KDR:541L21 anti- | UGCACUCAGUCACCUCCACTT | 3459 |
| | | | | sense siNA (523C) | | |
| | | | | stab00 | | |
| 888 | GCUGGCAUGGUCUUCUGUGAAGC | 2441 | 36356 | KDR:906L21 anti- | UUCACAGAAGACCAUGCCATT | 3460 |
| | | | | sense siNA (888C) | | |
| | | | | stab00 | | |
| 889 | CUGGCAUGGUCUUCUGUGAAGCA | 2442 | 36357 | KDR:907L21 anti- | CUUCACAGAAGACCAUGCCTT | 3461 |
| | | | | sense siNA (889C) | | |
| | | | | stab00 | | |
| 905 | UGAAGCAAAAAUUAAUGAUGAAA | 2443 | 36358 | KDR:923L21 anti- | UCAUCAUUAAUUUUUGCUUTT | 3462 |
| | | | | sense siNA (905C) | | |
| | | | | stab00 | | |
| 906 | GAAGCAAAAAUUAAUGAUGAAAG | 2444 | 36359 | KDR:924L21 anti- | UUCAUCAUUAAUUUUUGCUTT | 3463 |
| | | | | sense siNA (906C) | | |
| | | | | stab00 | | |
| 1249 | CCAAGAAGAACAGCACAUUUGUC | 2445 | 36360 | KDR:1267L21 anti- | CAAAUGUGCUGUUCUUCUUTT | 3464 |
| | | | | sense siNA (1249C) | | |
| | | | | stab00 | | |
| 1260 | AGCACAUUUGUCAGGGUCCAUGA | 2446 | 36361 | KDR:1278L21 anti- | AUGGACCCUGACAAAUGUGTT | 3465 |
| | | | | sense siNA (1260C) | | |
| | | | | stab00 | | |
| 1305 | AGUGGCAUGGAAUCUCUGGUGGA | 2447 | 36362 | KDR:1323L21 anti- | CACCAGAGAUUCCAUGCCATT | 3466 |
| | | | | sense siNA (1305C) | | |
| | | | | stab00 | | |
| 1315 | AAUCUCUGGUGGAAGCCACGGUG | 2448 | 36363 | KDR:1333L21 anti- | CCGUGGCUUCCACCAGAGATT | 3467 |
| | | | | sense siNA (1315C) | | |
| | | | | stab00 | | |
| 1541 | GGUCUCUCUGGUUGUGUAUGUCC | 2449 | 36364 | KDR:1559L21 anti- | ACAUACACAACCAGAGAGATT | 3468 |
| | | | | sense siNA (1541C) | | |
| | | | | stab00 | | |
| 1542 | GUCUCUCUGGUUGUGUAUGUCCC | 2450 | 36365 | KDR:1560L21 anti- | GACAUACACAACCAGAGAGTT | 3469 |
| | | | | sense siNA (1542C) | | |
| | | | | stab00 | | |
| 1588 | UAAUCUCUCCUGUGGAUUCCUAC | 2451 | 36366 | KDR:1606L21 anti- | AGGAAUCCACAGGAGAGAUTT | 3470 |
| | | | | sense siNA (1588C) | | |
| | | | | stab00 | | |
| 1589 | AAUCUCUCCUGUGGAUUCCUACC | 2452 | 36367 | KDR:1607L21 anti- | UAGGAAUCCACAGGAGAGATT | 3471 |
| | | | | sense siNA (1589C) | | |
| | | | | stab00 | | |
| 1875 | GUGUCAGCUUUGUACAAAUGUGA | 2453 | 36368 | KDR:1893L21 anti- | ACAUUUGUACAAAGCUGACTT | 3472 |
| | | | | sense siNA (1875C) | | |
| | | | | stab00 | | |
| 2874 | GACAAGACAGCAACUUGCAGGAC | 2454 | 36369 | KDR:2892L21 anti- | CCUGCAAGUUGCUGUCUUGTT | 3473 |
| | | | | sense siNA (2874C) | | |
| | | | | stab00 | | |
| 2875 | ACAAGACAGCAACUUGCAGGACA | 2455 | 36370 | KDR:2893L21 anti- | UCCUGCAAGUUGCUGUCUUTT | 3474 |
| | | | | sense siNA (2875C) | | |
| | | | | stab00 | | |
| 2876 | CAAGACAGCAACUUGCAGGACAG | 2456 | 36371 | KDR:2894L21 anti- | GUCCUGCAAGUUGCUGUCUTT | 3475 |
| | | | | sense siNA (2876C) | | |
| | | | | stab00 | | |
| 3039 | CUCAUGGUGAUUGUGGAAUUCUG | 2457 | 36372 | KDR:3057L21 anti- | GAAUUCCACAAUCACCAUGTT | 3476 |
| | | | | sense siNA (3039C) | | |
| | | | | stab00 | | |
| 3040 | UCAUGGUGAUUGUGGAAUUCUGC | 2458 | 36373 | KDR:3058L21 anti- | AGAAUUCCACAAUCACCAUTT | 3477 |
| | | | | sense siNA (3040C) | | |
| | | | | stab00 | | |
| 3249 | UCCCUCAGUGAUGUAGAAGAAGA | 2459 | 36374 | KDR:3267L21 anti- | UUCUUCUACAUCACUGAGGTT | 3478 |
| | | | | sense siNA (3249C) | | |
| | | | | stab00 | | |
| 3263 | AGAAGAAGAGGAAGCUCCUGAAG | 2460 | 36375 | KDR:3281L21 anti- | UCAGGAGCUUCCUCUUCUUTT | 3479 |
| | | | | sense siNA (3263C) | | |
| | | | | stab00 | | |
| 3264 | GAAGAAGAGGAAGCUCCUGAAGA | 2461 | 36376 | KDR:3282L21 anti- | UUCAGGAGCUUCCUCUUCUTT | 3480 |
| | | | | sense siNA (3264C) | | |
| | | | | stab00 | | |
| 3269 | AGAGGAAGCUCCUGAAGAUCUGU | 2462 | 36377 | KDR:3287L21 anti- | AGAUCUUCAGGAGCUUCCUTT | 3481 |
| | | | | sense siNA (3269C) | | |
| | | | | stab00 | | |
| 3270 | GAGGAAGCUCCUGAAGAUCUGUA | 2463 | 36378 | KDR:3288L21 anti- | CAGAUCUUCAGGAGCUUCCTT | 3482 |
| | | | | sense siNA (3270C) | | |
| | | | | stab00 | | |
| 3346 | AGGGCAUGGAGUUCUUGGCAUCG | 2464 | 36379 | KDR:3364L21 anti- | AUGCCAAGAACUCCAUGCCTT | 3483 |
| | | | | sense siNA (3346C) | | |
| | | | | stab00 | | |
| 3585 | UUGCUGUGGGAAAUAUUUUCCUU | 2465 | 36380 | KDR:3603L21 anti- | GGAAAAUAUUUCCCACAGCTT | 3484 |
| | | | | sense siNA (3585C) | | |
| | | | | stab00 | | |
| 3586 | UGCUGUGGGAAAUAUUUUCCUUA | 2466 | 36381 | KDR:3604L21 anti- | AGGAAAAUAUUUCCCACAGTT | 3485 |
| | | | | sense siNA (3586C) | | |
| | | | | stab00 | | |
| 3860 | CAUGGAAGAGGAUUCUGGACUCU | 2467 | 36382 | KDR:3878L21 anti- | AGUCCAGAAUCCUCUUCCATT | 3486 |
| | | | | sense siNA (3860C) | | |
| | | | | stab00 | | |
| 3877 | GACUCUCUCUGCCUACCUCACCU | 2468 | 36383 | KDR:3895L21 anti- | GUGAGGUAGGCAGAGAGAGTT | 3487 |
| | | | | sense siNA (3877C) | | |
| | | | | stab00 | | |
| 3878 | ACUCUCUCUGCCUACCUCACCUG | 2469 | 36384 | KDR:3896L21 anti- | GGUGAGGUAGGCAGAGAGATT | 3488 |
| | | | | sense siNA (3878C) | | |
| | | | | stab00 | | |
| 4287 | AAGCUGAUAGAGAUUGGAGUGCA | 2470 | 36385 | KDR:4305L21 anti- | CACUCCAAUCUCUAUCAGCTT | 3489 |
| | | | | sense siNA (4287C) | | |
| | | | | stab00 | | |
| 4288 | AGCUGAUAGAGAUUGGAGUGCAA | 2471 | 36386 | KDR:4306L21 anti- | GCACUCCAAUCUCUAUCAGTT | 3490 |
| | | | | sense siNA (4288C) | | |
| | | | | stab00 | | |
| 4318 | GCACAGCCCAGAUUCUCCAGCCU | 2472 | 36387 | KDR:4336L21 anti- | GCUGGAGAAUCUGGGCUGUTT | 3491 |
| | | | | sense siNA (4318C) | | |
| | | | | stab00 | | |
| 4319 | CACAGCCCAGAUUCUCCAGCCUG | 2473 | 36388 | KDR:4337L21 anti- | GGCUGGAGAAUCUGGGCUGTT | 3492 |
| | | | | sense siNA (4319C) | | |
| | | | | stab00 | | |
| 4320 | ACAGCCCAGAUUCUCCAGCCUGA | 2474 | 36389 | KDR:4338L21 anti- | AGGCUGGAGAAUCUGGGCUTT | 3493 |
| | | | | sense siNA (4320C) | | |
| | | | | stab00 | | |
| 4321 | CAGCCCAGAUUCUCCAGCCUGAC | 2475 | 36390 | KDR:4339L21 anti- | CAGGCUGGAGAAUCUGGGCTT | 3494 |
| | | | | sense siNA (4321C) | | |
| | | | | stab00 | | |
| 4359 | AGCUCUCCUCCUGUUUAAAAGGA | 2476 | 36391 | KDR:4377L21 anti- | CUUUUAAACAGGAGGAGAGTT | 3495 |
| | | | | sense siNA (4359C) | | |
| | | | | stab00 | | |
| 4534 | UAUCCUGGAAGAGGCUUGUGACC | 2477 | 36392 | KDR:4552L21 anti- | UCACAAGCCUCUUCCAGGATT | 3496 |
| | | | | sense siNA (4534C) | | |
| | | | | stab00 | | |
| 4535 | AUCCUGGAAGAGGCUUGUGACCC | 2478 | 36393 | KDR:4553L21 anti- | GUCACAAGCCUCUUCCAGGTT | 3497 |
| | | | | sense siNA (4535C) | | |
| | | | | stab00 | | |
| 4536 | UCCUGGAAGAGGCUUGUGACCCA | 2479 | 36394 | KDR:4554L21 anti- | GGUCACAAGCCUCUUCCAGTT | 3498 |
| | | | | sense siNA (4536C) | | |
| | | | | stab00 | | |
| 4539 | UGGAAGAGGCUUGUGACCCAAGA | 2480 | 36395 | KDR:4557L21 anti- | UUGGGUCACAAGCCUCUUCTT | 3499 |
| | | | | sense siNA (4539C) | | |
| | | | | stab00 | | |
| 4769 | UGUUGAAGAUGGGAAGGAUUUGC | 2481 | 36396 | KDR:4787L21 anti- | AAAUCCUUCCCAUCUUCAATT | 3500 |
| | | | | sense siNA (4769C) | | |
| | | | | stab00 | | |
| 4934 | UCUGGUGGAGGUGGGCAUGGGGU | 2482 | 36397 | KDR:4952L21 anti- | CCCAUGCCCACCUCCACCATT | 3501 |
| | | | | sense siNA (4934C) | | |
| | | | | stab00 | | |
| 5038 | UCGUUGUGCUGUUUCUGACUCCU | 2483 | 36398 | KDR:5056L21 anti- | GAGUCAGAAACAGCACAACTT | 3502 |
| | | | | sense siNA (5038C) | | |
| | | | | stab00 | | |
| 5039 | CGUUGUGCUGUUUCUGACUCCUA | 2484 | 36399 | KDR:5057L21 anti- | GGAGUCAGAAACAGCACAATT | 3503 |
| | | | | sense siNA (5039C) | | |
| | | | | stab00 | | |
| 5040 | GUUGUGCUGUUUCUGACUCCUAA | 2485 | 36400 | KDR:5058L21 anti- | AGGAGUCAGAAACAGCACATT | 3504 |
| | | | | sense siNA (5040C) | | |
| | | | | stab00 | | |
| 5331 | UCAAAGUUUCAGGAAGGAUUUUA | 2486 | 36401 | KDR:5349L21 anti- | AAAUCCUUCCUGAAACUUUTT | 3505 |
| | | | | sense siNA (5331C) | | |
| | | | | stab00 | | |
| 5332 | CAAAGUUUCAGGAAGGAUUUUAC | 2487 | 36402 | KDR:5350L21 anti- | AAAAUCCUUCCUGAAACUUTT | 3506 |
| | | | | sense siNA (5332C) | | |
| | | | | stab00 | | |
| 5333 | AAAGUUUCAGGAAGGAUUUUACC | 2488 | 36403 | KDR:5351L21 anti- | UAAAAUCCUUCCUGAAACUTT | 3507 |
| | | | | sense siNA (5333C) | | |
| | | | | stab00 | | |
| 5587 | UCAAAAAAGAAAAUGUGUUUUUU | 2489 | 36404 | KDR:5605L21 anti- | AAAACACAUUUUCUUUUUUTT | 3508 |
| | | | | sense siNA (5587C) | | |
| | | | | stab00 | | |
| 5737 | CUAUUCACAUUUUGUAUCAGUAU | 2490 | 36405 | KDR:5755L21 anti- | ACUGAUACAAAAUGUGAAUTT | 3509 |
| | | | | sense siNA (5737C) | | |
| | | | | stab00 | | |
| 5738 | UAUUCACAUUUUGUAUCAGUAUU | 2491 | 36406 | KDR:5756L21 anti- | UACUGAUACAAAAUGUGAATT | 3510 |
| | | | | sense siNA (5738C) | | |
| | | | | stab00 | | |
| 5739 | AUUCACAUUUUGUAUCAGUAUUA | 2492 | 36407 | KDR:5757L21 anti- | AUACUGAUACAAAAUGUGATT | 3511 |
| | | | | sense siNA (5739C) | | |
| | | | | stab00 | | |
| 359 | GGCCGCCUCUGUGGGUUUGCCUA | 2493 | 37460 | KDR:359U21 sense siNA | B ccGccucuGuGGGuuuGccTT B | 3512 |
| | | | | stab07 | | |
| 360 | GCCGCCUCUGUGGGUUUGCCUAG | 2494 | 37461 | KDR:360U21 sense siNA | B cGccucuGuGGGuuuGccuTT B | 3513 |
| | | | | stab07 | | |
| 799 | ACCCAGAAAAGAGAUUUGUUCCU | 2495 | 37462 | KDR:799U21 sense siNA | B ccAGAAAAGAGAuuuGuucTT B | 3514 |
| | | | | stab07 | | |
| 826 | GUAACAGAAUUUCCUGGGACAGC | 2496 | 37463 | KDR:826U21 sense siNA | B AAcAGAAuuuccuGGGAcATT B | 3515 |
| | | | | stab07 | | |
| 1027 | AGCUUGUCUUAAAUUGUACAGCA | 2497 | 37464 | KDR:1027U21 sense siNA | B cuuGucuuAAAuuGuAcAGTT B | 3516 |
| | | | | stab07 | | |
| 1827 | GAAGGAAAAAACAAAACUGUAAG | 2498 | 37465 | KDR:1827U21 sense siNA | B AGGAAAAAAcAAAAcuGuATT B | 3517 |
| | | | | stab07 | | |
| 1828 | AAGGAAAAAACAAAACUGUAAGU | 2499 | 37466 | KDR:1828U21 sense siNA | B GGAAAAAAcAAAAcuGuAATT B | 3518 |
| | | | | stab07 | | |
| 1947 | ACCAGGGGUCCUGAAAUUACUUU | 2500 | 37467 | KDR:1947U21 sense siNA | B cAGGGGuccuGAAAuuAcuTT B | 3519 |
| | | | | stab07 | | |
| 2247 | AAGACCAAGAAAAGACAUUGCGU | 2501 | 37468 | KDR:2247U21 sense siNA | B GAccAAGAAAAGAcAuuGcTT B | 3520 |
| | | | | stab07 | | |
| 2501 | AGGCCUCUACACCUGCCAGGCAU | 2502 | 37469 | KDR:2501U21 sense siNA | B GccucuAcAccuGccAGGcTT B | 3521 |
| | | | | stab07 | | |
| 2624 | GAUUGCCAUGUUCUUCUGGCUAC | 2503 | 37470 | KDR:2624U21 sense siNA | B uuGccAuGuucuucuGGcuTT B | 3522 |
| | | | | stab07 | | |
| 2685 | GGAGGGGAACUGAAGACAGGCUA | 2504 | 37471 | KDR:2685U21 sense siNA | B AGGGGAAcuGAAGAcAGGcTT B | 3523 |
| | | | | stab07 | | |
| 2688 | GGGGAACUGAAGACAGGCUACUU | 2505 | 37472 | KDR:2688U21 sense siNA | B GGAAcuGAAGAcAGGcuAcTT B | 3524 |
| | | | | stab07 | | |
| 2689 | GGGAACUGAAGACAGGCUACUUG | 2506 | 37473 | KDR:2689U21 sense siNA | B GAAcuGAAGAcAGGcuAcuTT B | 3525 |
| | | | | stab07 | | |
| 2690 | GGAACUGAAGACAGGCUACUUGU | 2507 | 37474 | KDR:2690U21 sense siNA | B AAcuGAAGAcAGGcuAcuuTT B | 3526 |
| | | | | stab07 | | |
| 2692 | AACUGAAGACAGGCUACUUGUCC | 2508 | 37475 | KDR:2692U21 sense siNA | B cuGAAGAcAGGcuAcuuGuTT B | 3527 |
| | | | | stab07 | | |
| 2762 | ACUGCCUUAUGAUGCCAGCAAAU | 2509 | 37476 | KDR:2762U21 sense siNA | B uGccuuAuGAuGccAGcAATT B | 3528 |
| | | | | stab07 | | |
| 3187 | GGCGCUUGGACAGCAUCACCAGU | 2510 | 37477 | KDR:3187U21 sense siNA | B cGcuuGGAcAGcAucAccATT B | 3529 |
| | | | | stab07 | | |
| 3293 | UAAGGACUUCCUGACCUUGGAGC | 2511 | 37478 | KDR:3293U21 sense siNA | B AGGAcuuccuGAccuuGGATT B | 3530 |
| | | | | stab07 | | |
| 3306 | ACCUUGGAGCAUCUCAUCUGUUA | 2512 | 37479 | KDR:3306U21 sense siNA | B cuuGGAGcAucucAucuGuTT B | 3531 |
| | | | | stab07 | | |
| 3308 | CUUGGAGCAUCUCAUCUGUUACA | 2513 | 37480 | KDR:3308U21 sense siNA | B uGGAGcAucucAucuGuuATT B | 3532 |
| | | | | stab07 | | |
| 3309 | UUGGAGCAUCUCAUCUGUUACAG | 2514 | 37481 | KDR:3309U21 sense siNA | B GGAGcAucucAucuGuuAcTT B | 3533 |
| | | | | stab07 | | |
| 3312 | GAGCAUCUCAUCUGUUACAGCUU | 2515 | 37482 | KDR:3312U21 sense siNA | B GcAucucAucuGuuAcAGcTT B | 3534 |
| | | | | stab07 | | |
| 3320 | CAUCUGUUACAGCUUCCAAGUGG | 2516 | 37483 | KDR:3320U21 sense siNA | B ucuGuuAcAGcuuccAAGuTT B | 3535 |
| | | | | stab07 | | |
| 3324 | UGUUACAGCUUCCAAGUGGCUAA | 2517 | 37484 | KDR:3324U21 sense siNA | B uuAcAGcuuccAAGuGGcuTT B | 3536 |
| | | | | stab07 | | |
| 3334 | UCCAAGUGGCUAAGGGCAUGGAG | 2518 | 37485 | KDR:3334U21 sense siNA | B cAAGuGGcuAAGGGcAuGGTT B | 3537 |
| | | | | stab07 | | |
| 3346 | AGGGCAUGGAGUUCUUGGCAUCG | 2464 | 37486 | KDR:3346U21 sense siNA | B GGcAuGGAGuucuuGGcAuTT B | 3538 |
| | | | | stab07 | | |
| 3347 | GGGCAUGGAGUUCUUGGCAUCGC | 2519 | 37487 | KDR:3347U21 sense siNA | B GcAuGGAGuucuuGGcAucTT B | 3539 |
| | | | | stab07 | | |
| 3857 | GAGCAUGGAAGAGGAUUCUGGAC | 2520 | 37488 | KDR:3857U21 sense siNA | B GcAuGGAAGAGGAuucuGGTT B | 3540 |
| | | | | stab07 | | |
| 3858 | AGCAUGGAAGAGGAUUCUGGACU | 2521 | 37489 | KDR:3858U21 sense siNA | B cAuGGAAGAGGAuucuGGATT B | 3541 |
| | | | | stab07 | | |
| 3860 | CAUGGAAGAGGAUUCUGGACUCU | 2467 | 37490 | KDR:3860U21 sense siNA | B uGGAAGAGGAuucuGGAcuTT B | 3542 |
| | | | | stab07 | | |
| 3883 | CUCUGCCUACCUCACCUGUUUCC | 2522 | 37491 | KDR:3883U21 sense siNA | B cuGccuAccucAccuGuuuTT B | 3543 |
| | | | | stab07 | | |
| 3884 | UCUGCCUACCUCACCUGUUUCCU | 2523 | 37492 | KDR:3884U21 sense siNA | B uGccuAccucAccuGuuucTT B | 3544 |
| | | | | stab07 | | |
| 3885 | CUGCCUACCUCACCUGUUUCCUG | 2524 | 37493 | KDR:3885U21 sense siNA | B GccuAccucAccuGuuuccTT B | 3545 |
| | | | | stab07 | | |
| 3892 | CCUCACCUGUUUCCUGUAUGGAG | 2525 | 37494 | KDR:3892U21 sense siNA | B ucAccuGuuuccuGuAuGGTT B | 3546 |
| | | | | stab07 | | |
| 3936 | AAAUUCCAUUAUGACAACACAGC | 2526 | 37495 | KDR:3938U21 sense siNA | B AuuccAuuAuGAcAAcAcATT B | 3547 |
| | | | | stab07 | | |
| 3940 | UCCAUUAUGACAACACAGCAGGA | 2527 | 37496 | KDR:3940U21 sense siNA | B cAuuAuGAcAAcAcAGcAGTT B | 3548 |
| | | | | stab07 | | |
| 359 | GGCCGCCUCUGUGGGUUUGCCUA | 2493 | 37497 | KDR:377L21 anti- | GGCAAAcccAcAGAGGcGGTT | 3549 |
| | | | | sense siNA (359C) | | |
| | | | | stab26 | | |
| 360 | GCCGCCUCUGUGGGUUUGCCUAG | 2494 | 37498 | KDR:378L21 anti- | AGGcAAAcccAcAGAGGcGTT | 3550 |
| | | | | sense siNA (360C) | | |
| | | | | stab26 | | |
| 799 | ACCCAGAAAAGAGAUUUGUUCCU | 2495 | 37499 | KDR:817L21 anti- | GAAcAAAucucuuuucuGGTT | 3551 |
| | | | | sense siNA (799C) | | |
| | | | | stab26 | | |
| 826 | GUAACAGAAUUUCCUGGGACAGC | 2496 | 37500 | KDR:844L21 anti- | UGUcccAGGAAAuucuGuuTT | 3552 |
| | | | | sense siNA (826C) | | |
| | | | | stab26 | | |
| 1027 | AGCUUGUCUUAAAUUGUACAGCA | 2497 | 37501 | KDR:1045L21 anti- | CUGuAcAAuuuAAGAcAAGTT | 3553 |
| | | | | sense siNA (1027C) | | |
| | | | | stab26 | | |
| 1827 | GAAGGAAAAAACAAAACUGUAAG | 2498 | 37502 | KDR:1845L21 anti- | UACAGuuuuGuuuuuuccuTT | 3554 |
| | | | | sense siNA (1827C) | | |
| | | | | stab26 | | |
| 1828 | AAGGAAAAAACAAAACUGUAAGU | 2499 | 37503 | KDR:1846L21 anti- | UUAcAGuuuuGuuuuuuccTT | 3555 |
| | | | | sense siNA (1828C) | | |
| | | | | stab26 | | |
| 1947 | ACCAGGGGUCCUGAAAUUACUUU | 2500 | 37504 | KDR:1965L21 anti- | AGUAAuuucAGGAccccuGTT | 3556 |
| | | | | sense siNA (1947C) | | |
| | | | | stab26 | | |
| 2247 | AAGACCAAGAAAAGACAUUGCGU | 2501 | 37505 | KDR:2265L21 anti- | GCAAuGucuuuucuuGGucTT | 3557 |
| | | | | sense siNA (2247C) | | |
| | | | | stab26 | | |
| 2501 | AGGCCUCUACACCUGCCAGGCAU | 2502 | 37506 | KDR:2519L21 anti- | GCCuGGcAGGuGuAGAGGcTT | 3558 |
| | | | | sense siNA (2501C) | | |
| | | | | stab26 | | |
| 2624 | GAUUGCCAUGUUCUUCUGGCUAC | 2503 | 37507 | KDR:2642L21 anti- | AGCcAGAAGAAcAuGGcAATT | 3559 |
| | | | | sense siNA (2624C) | | |
| | | | | stab26 | | |
| 2685 | GGAGGGGAACUGAAGACAGGCUA | 2504 | 37508 | KDR:2703L21 anti- | GCCuGucuucAGuuccccuTT | 3560 |
| | | | | sense siNA (2685C) | | |
| | | | | stab26 | | |
| 2688 | GGGGAACUGAAGACAGGCUACUU | 2505 | 37509 | KDR:2706L21 anti- | GUAGccuGucuucAGuuccTT | 3561 |
| | | | | sense siNA (2688C) | | |
| | | | | stab26 | | |
| 2689 | GGGAACUGAAGACAGGCUACUUG | 2506 | 37510 | KDR:2707L21 anti- | AGUAGccuGucuucAGuucTT | 3562 |
| | | | | sense siNA (2689C) | | |
| | | | | stab26 | | |
| 2690 | GGAACUGAAGACAGGCUACUUGU | 2507 | 37511 | KDR:2708L21 anti- | AAGuAGccuGucuucAGuuTT | 3563 |
| | | | | sense siNA (2690C) | | |
| | | | | stab26 | | |
| 2692 | AACUGAAGACAGGCUACUUGUCC | 2508 | 37512 | KDR:2710L21 anti- | ACAAGuAGccuGucuucAGTT | 3564 |
| | | | | sense siNA (2692C) | | |
| | | | | stab26 | | |
| 2762 | ACUGCCUUAUGAUGCCAGCAAAU | 2509 | 37513 | KDR:2780L21 anti- | UUGcuGGcAucAuAAGGcATT | 3565 |
| | | | | sense siNA (2762C) | | |
| | | | | stab26 | | |
| 3187 | GGCGCUUGGACAGCAUCACCAGU | 2510 | 37514 | KDR:3205L21 anti- | UGGuGAuGcuGuccAAGcGTT | 3566 |
| | | | | sense siNA (3187C) | | |
| | | | | stab26 | | |
| 3293 | UAAGGACUUCCUGACCUUGGAGC | 2511 | 37515 | KDR:3311L21 anti- | UCCAAGGucAGGAAGuccuTT | 3567 |
| | | | | sense siNA (3293C) | | |
| | | | | stab26 | | |
| 3306 | ACCUUGGAGCAUCUCAUCUGUUA | 2512 | 37516 | KDR:3324L21 anti- | ACAGAuGAGAuGcuccAAGTT | 3568 |
| | | | | sense siNA (3306C) | | |
| | | | | stab26 | | |
| 3308 | CUUGGAGCAUCUCAUCUGUUACA | 2513 | 37517 | KDR:3326L21 anti- | UAAcAGAuGAGAuGcuccATT | 3569 |
| | | | | sense siNA (3308C) | | |
| | | | | stab26 | | |
| 3309 | UUGGAGCAUCUCAUCUGUUACAG | 2514 | 37518 | KDR:3327L21 anti- | GUAAcAGAuGAGAuGcuccTT | 3570 |
| | | | | sense siNA (3309C) | | |
| | | | | stab26 | | |
| 3312 | GAGCAUCUCAUCUGUUACAGCUU | 2515 | 37519 | KDR:3330L21 anti- | GCUGuAAcAGAuGAGAuGcTT | 3571 |
| | | | | sense siNA (3312C) | | |
| | | | | stab26 | | |
| 3320 | CAUCUGUUACAGCUUCCAAGUGG | 2516 | 37520 | KDR:3338L21 anti- | ACUuGGAAGcuGuAAcAGATT | 3572 |
| | | | | sense siNA (3320C) | | |
| | | | | stab26 | | |
| 3324 | UGUUACAGCUUCCAAGUGGCUAA | 2517 | 37521 | KDR:3342L21 anti- | AGCcAcuuGGAAGcuGuAATT | 3573 |
| | | | | sense siNA (3324C) | | |
| | | | | stab26 | | |
| 3334 | UCCAAGUGGCUAAGGGCAUGGAG | 2518 | 37522 | KDR:3352L21 anti- | CCAuGcccuuAGccAcuuGTT | 3574 |
| | | | | sense siNA (3334C) | | |
| | | | | stab26 | | |
| 3346 | AGGGCAUGGAGUUCUUGGCAUCG | 2464 | 37523 | KDR:3364L21 anti- | AUGccAAGAAcuccAuGccTT | 3575 |
| | | | | sense siNA (3346C) | | |
| | | | | stab26 | | |
| 3347 | GGGCAUGGAGUUCUUGGCAUCGC | 2519 | 37524 | KDR:3365L21 anti- | GAUGccAAGAAcuccAuGcTT | 3576 |
| | | | | sense siNA (3347C) | | |
| | | | | stab26 | | |
| 3758 | CACGUUUUCAGAGUUGGUGGAAC | 2426 | 37525 | KDR:3776L21 anti- | UCCAccAAcucuGAAAAcGTT | 3577 |
| | | | | sense siNA (3758C) | | |
| | | | | stab26 | | |
| 3857 | GAGCAUGGAAGAGGAUUCUGGAC | 2520 | 37526 | KDR:3875L21 anti- | CCAGAAuccucuuccAuGcTT | 3578 |
| | | | | sense siNA (3857C) | | |
| | | | | stab26 | | |
| 3858 | AGCAUGGAAGAGGAUUCUGGACU | 2521 | 37527 | KDR:3876L21 anti- | UCCAGAAuccucuuccAuGTT | 3579 |
| | | | | sense siNA (3858C) | | |
| | | | | stab26 | | |
| 3860 | CAUGGAAGAGGAUUCUGGACUCU | 2467 | 37528 | KDR:3878L21 anti- | AGUccAGAAuccucuuccATT | 3580 |
| | | | | sense siNA (3860C) | | |
| | | | | stab26 | | |
| 3883 | CUCUGCCUACCUCACCUGUUUCC | 2522 | 37529 | KDR:3901L21 anti- | AAAcAGGuGAGGuAGGcAGTT | 3581 |
| | | | | sense siNA (3883C) | | |
| | | | | stab26 | | |
| 3884 | UCUGCCUACCUCACCUGUUUCCU | 2523 | 37530 | KDR:3902L21 anti- | GAAAcAGGuGAGGuAGGcATT | 3582 |
| | | | | sense siNA (3884C) | | |
| | | | | stab26 | | |
| 3885 | CUGCCUACCUCACCUGUUUCCUG | 2524 | 37531 | KDR:3903L21 anti- | GGAAAcAGGuGAGGuAGGcTT | 3583 |
| | | | | sense siNA (3885C) | | |
| | | | | stab26 | | |
| 3892 | CCUCACCUGUUUCCUGUAUGGAG | 2525 | 37532 | KDR:3910L21 anti- | CCAuAcAGGAAAcAGGuGATT | 3584 |
| | | | | sense siNA (3892C) | | |
| | | | | stab26 | | |
| 3893 | CUCACCUGUUUCCUGUAUGGAGG | 2427 | 37533 | KDR:3911L21 anti- | UCCAuAcAGGAAAcAGGuGTT | 3585 |
| | | | | sense siNA (3893C) | | |
| | | | | stab26 | | |
| 3936 | AAAUUCCAUUAUGACAACACAGC | 2526 | 37534 | KDR:3954L21 anti- | UGUGuuGucAuAAuGGAAuTT | 3586 |
| | | | | sense siNA (3936C) | | |
| | | | | stab26 | | |
| 3940 | UCCAUUAUGACAACACAGCAGGA | 2527 | 37535 | KDR:3958L21 anti- | CUGcuGuGuuGucAuAAuGTT | 3587 |
| | | | | sense siNA (3940C) | | |
| | | | | stab26 | | |
| 3948 | GACAACACAGCAGGAAUCAGUCA | 2408 | 37536 | KDR:3966L21 anti- | ACUGAuuccuGcuGuGuuGTT | 3588 |
| | | | | sense siNA (3948C) | | |
| | | | | stab26 | | |

VEGFR3

| | | | |
|---|---|---|---|
| Target | Seq | Cmpd | Seq |

| | | | | | | |
|---|---|---|---|---|---|---|
| Pos | Target | ID | # | Aliases | Sequence | ID |

| | | | | | | |
|---|---|---|---|---|---|---|
| 2011 | AGCACUGCCACAAGAAGUACCUG | 2528 | 31904 | FLT4:2011U21 sense | CACUGCCACAAGAAGUACCTT | 3589 |
| | | | | siNA | | |
| 3921 | CUGAAGCAGAGAGAGAGAAGGCA | 2529 | | FLT4:3921U21 sense | GAAGCAGAGAGAGAGAAGGTT | 3590 |
| | | | | siNA | | |
| 4038 | AAAGAGGAACCAGGAGGACAAGA | 2530 | | FLT4:4038U21 sense | AGAGGAACCAGGAGGACAATT | 3591 |
| | | | | siNA | | |
| 4054 | GACAAGAGGAGCAUGAAAGUGGA | 2531 | | FLT4:4054U21 sense | CAAGAGGAGCAUGAAAGUGTT | 3592 |
| | | | | siNA | | |
| 2011 | AGCACUGCCACAAGAAGUACCUG | 2528 | 31908 | FLT4:2029L21 anti- | GGUACUUCUUGUGGCAGUGTT | 3593 |
| | | | | sense siNA (2011C) | | |
| 3921 | CUGAAGCAGAGAGAGAGAAGGCA | 2529 | | FLT4:3939L21 anti- | CCUUCUCUCUCUCUGCUUCTT | 3594 |
| | | | | sense siNA (3921C) | | |
| 4038 | AAAGAGGAACCAGGAGGACAAGA | 2530 | | FLT4:4056L21 anti- | UUGUCCUCCUGGUUCCUCUTT | 3595 |
| | | | | sense siNA (4038C) | | |
| 4054 | GACAAGAGGAGCAUGAAAGUGGA | 2531 | | FLT4:4072L21 anti- | CACUUUCAUGCUCCUCUUGTT | 3596 |
| | | | | sense siNA | | |
| | | | | (4054C) | | |
| 2011 | AGCACUGCCACAAGAAGUACCUG | 2528 | | FLT4:2011U21 sense | B cAcuGccAcAAGAAGuAccTT B | 3597 |
| | | | | siNA stab04 | | |
| 3921 | CUGAAGCAGAGAGAGAGAAGGCA | 2529 | | FLT4:3921U21 sense | B GAAGCAGAGAGAGAGAAGGTT B | 3598 |
| | | | | siNA stab04 | | |
| 4038 | AAAGAGGAACCAGGAGGACAAGA | 2530 | | FLT4:4038U21 sense | B AGAGGAAccAGGAGGAcAATT B | 3599 |
| | | | | siNA stab04 | | |
| 4054 | GACAAGAGGAGCAUGAAAGUGGA | 2531 | | FLT4:4054U21 sense | B cAAGAGGAGcAuGAAAGuGTT B | 3600 |
| | | | | siNA stab04 | | |
| 2011 | AGCACUGCCACAAGAAGUACCUG | 2528 | | FLT4:2029L21 anti- | GGuAcuucuuGuGGcAGuGTsT | 3601 |
| | | | | sense siNA (2011C) | | |
| | | | | stab05 | | |
| 3921 | CUGAAGCAGAGAGAGAGAAGGCA | 2529 | | FLT4:3939L21 anti- | ccuucucucucucuGcuucTsT | 3602 |
| | | | | sense siNA (3921C) | | |
| | | | | stab05 | | |
| 4038 | AAAGAGGAACCAGGAGGACAAGA | 2530 | | FLT4:4056L21 anti- | uuGuccuccuGGuuccucuTsT | 3603 |
| | | | | sense siNA (4038C) | | |
| | | | | stab05 | | |
| 4054 | GACAAGAGGAGCAUGAAAGUGGA | 2531 | | FLT4:4072L21 anti- | cAcuuucAuGcuccucuuGTsT | 3604 |
| | | | | sense siNA (4054C) | | |
| | | | | stab05 | | |
| 2011 | AGCACUGCCACAAGAAGUACCUG | 2528 | | FLT4:2011U21 sense | B cAcuGccAcAAGAAGuAccTT B | 3605 |
| | | | | siNA stab07 | | |
| 3921 | CUGAAGCAGAGAGAGAGAAGGCA | 2529 | | FLT4:3921U21 sense | B GAAGcAGAGAGAGAGAAGGTT B | 3606 |
| | | | | siNA stab07 | | |
| 4038 | AAAGAGGAACCAGGAGGACAAGA | 2530 | | FLT4:4038U21 sense | B AGAGGAAccAGGAGGAcAATT B | 3607 |
| | | | | siNA stab07 | | |
| 4054 | GACAAGAGGAGCAUGAAAGUGGA | 2531 | | FLT4:4054U21 sense | B cAAGAGGAGcAuGAAAGuGTT B | 3608 |
| | | | | siNA stab07 | | |
| 2011 | AGCACUGCCACAAGAAGUACCUG | 2528 | | FLT4:2029L21 anti- | GGuAcuucuuGuGGcAGuGTsT | 3609 |
| | | | | sense siNA (2011C) | | |
| | | | | stab11 | | |
| 3921 | CUGAAGCAGAGAGAGAGAAGGCA | 2529 | | FLT4:3939L21 anti- | ccuucucucucucuGcuucTsT | 3610 |
| | | | | sense siNA (3921C) | | |
| | | | | stab11 | | |
| 4038 | AAAGAGGAACCAGGAGGACAAGA | 2530 | | FLT4:4056L21 anti- | uuGuccuccuGGuuccucuTsT | 3611 |
| | | | | sense siNA (4038C) | | |
| | | | | stab11 | | |
| 4054 | GACAAGAGGAGCAUGAAAGUGGA | 2531 | | FLT4:4072L21 anti- | cAcuuucAuGcuccucuuGTsT | 3612 |
| | | | | sense siNA (4054C) | | |
| | | | | stab11 | | |
| 1666 | ACUUCUAUGUGACCACCAUCCCC | 2532 | 31902 | FLT4:1666U21 sense | UUCUAUGUGACCACCAUCCTT | 3613 |
| | | | | siNA | | |
| 2009 | CAAGCACUGCCACAAGAAGUACC | 2533 | 31903 | FLT4:2009U21 sense | AGCACUGCCACAAGAAGUATT | 3614 |
| | | | | siNA | | |
| 2815 | AGUACGGCAACCUCUCCAACUUC | 2534 | 31905 | FLT4:2815U21 sense | UACGGCAACCUCUCCAACUTT | 3615 |
| | | | | siNA | | |
| 1666 | ACUUCUAUGUGACCACCAUCCCC | 2532 | 31906 | FLT4:1684L21 anti- | GGAUGGUGGUCACAUAGAATT | 3616 |
| | | | | sense siNA (1666C) | | |
| 2009 | CAAGCACUGCCACAAGAAGUACC | 2533 | 31907 | FLT4:2027L21 anti- | UACUUCUUGUGGCAGUGCUTT | 3617 |
| | | | | sense siNA (2009C) | | |
| 2815 | AGUACGGCAACCUCUCCAACUUC | 2534 | 31909 | FLT4:2833L21 anti- | AGUUGGAGAGGUUGCCGUATT | 3618 |
| | | | | sense siNA (2815C) | | |
| 1609 | CUGCCAUGUACAAGUGUGUGGUC | 2535 | 34383 | FLT4:1609U21 sense | B GCCAUGUACAAGUGUGUGGTT B | 3619 |
| | | | | siNA stab09 | | |
| 1666 | ACUUCUAUGUGACCACCAUCCCC | 2532 | 34384 | FLT4:1666U21 sense | B UUCUAUGUGACCACCAUCCTT B | 3620 |
| | | | | siNA stab09 | | |
| 2009 | CAAGCACUGCCACAAGAAGUACC | 2533 | 34385 | FLT4:2009U21 sense | B AGCACUGCCACAAGAAGUATT B | 3621 |
| | | | | siNA stab09 | | |
| 2011 | AGCACUGCCACAAGAAGUACCUG | 2528 | 34386 | FLT4:2011U21 sense | B CACUGCCACAAGAAGUACCTT B | 3622 |
| | | | | siNA stab09 | | |
| 2014 | ACUGCCACAAGAAGUACCUGUCG | 2536 | 34387 | FLT4:2014U21 sense | B UGCCACAAGAAGUACCUGUTT B | 3623 |
| | | | | siNA stab09 | | |
| 2815 | AGUACGGCAACCUCUCCAACUUC | 2534 | 34388 | FLT4:2815U21 sense | B UACGGCAACCUCUCCAACUTT B | 3624 |
| | | | | siNA stab09 | | |
| 3172 | UGGUGAAGAUCUGUGACUUUGGC | 2537 | 34389 | FLT4:3172U21 sense | B GUGAAGAUCUGUGACUUUGTT B | 3625 |
| | | | | siNA stab09 | | |
| 3176 | GAAGAUCUGUGACUUUGGCCUUG | 2538 | 34390 | FLT4:3176U21 sense | B AGAUCUGUGACUUUGGCCUTT B | 3626 |
| | | | | siNA stab09 | | |
| 1609 | CUGCCAUGUACAAGUGUGUGGUC | 2535 | 34391 | FLT4:1627L21 anti- | CCACACACUUGUACAUGGCTsT | 3627 |
| | | | | sense siNA (1609C) | | |
| | | | | stab10 | | |
| 1666 | ACUUCUAUGUGACCACCAUCCCC | 2532 | 34392 | FLT4:1684L21 anti- | GGAUGGUGGUCACAUAGAATsT | 3628 |
| | | | | sense siNA (1666C) | | |
| | | | | stab10 | | |
| 2009 | CAAGCACUGCCACAAGAAGUACC | 2533 | 34393 | FLT4:2027L21 anti- | UACUUCUUGUGGCAGUGCUTsT | 3629 |
| | | | | sense siNA (2009C) | | |
| | | | | stab10 | | |
| 2011 | AGCACUGCCACAAGAAGUACCUG | 2528 | 34394 | FLT4:2029L21 anti- | GGUACUUCUUGUGGCAGUGTsT | 3630 |
| | | | | sense siNA (2011C) | | |
| | | | | stab10 | | |
| 2014 | ACUGCCACAAGAAGUACCUGUCG | 2536 | 34395 | FLT4:2032L21 anti- | ACAGGUACUUCUUGUGGCATsT | 3631 |
| | | | | sense siNA (2014C) | | |
| | | | | stab10 | | |
| 2815 | AGUACGGCAACCUCUCCAACUUC | 2534 | 34396 | FLT4:2833L21 anti- | AGUUGGAGAGGUUGCCGUATsT | 3632 |
| | | | | sense siNA (2815C) | | |
| | | | | stab10 | | |
| 3172 | UGGUGAAGAUCUGUGACUUUGGC | 2537 | 34397 | FLT4:3190L21 anti- | CAAAGUCACAGAUCUUCACTsT | 3633 |
| | | | | sense siNA (3172C) | | |
| | | | | stab10 | | |
| 3176 | GAAGAUCUGUGACUUUGGCCUUG | 2538 | 34398 | FLT4:3194L21 anti- | AGGCCAAAGUCACAGAUCUTsT | 3634 |
| | | | | sense siNA (3176C) | | |
| | | | | stab10 | | |
| 1609 | CUGCCAUGUACAAGUGUGUGGUC | 2535 | 34399 | FLT4:1627L21 anti- | ccAcAcAcuuGuAcAuGGcTsT | 3635 |
| | | | | sense siNA (1609C) | | |
| | | | | stab08 | | |
| 1666 | ACUUCUAUGUGACCACCAUCCCC | 2532 | 34400 | FLT4:1684L21 anti- | GGAuGGuGGucAcAuAGAATsT | 3636 |
| | | | | sense siNA (1666C) | | |
| | | | | stab08 | | |
| 2009 | CAAGCACUGCCACAAGAAGUACC | 2533 | 34401 | FLT4:2027L21 anti- | uAcuucuuGuGGcAGuGcuTsT | 3637 |
| | | | | sense siNA (2009C) | | |
| | | | | stab08 | | |
| 2011 | AGCACUGCCACAAGAAGUACCUG | 2528 | 34402 | FLT4:2029L21 anti- | GGuAcuucuuGuGGcAGuGTsT | 3638 |
| | | | | sense siNA (2011C) | | |
| | | | | stab08 | | |
| 2014 | ACUGCCACAAGAAGUACCUGUCG | 2536 | 34403 | FLT4:2032L21 anti- | AcAGGuAcuucuuGuGGcATsT | 3639 |
| | | | | sense siNA (2014C) | | |
| | | | | stab08 | | |
| 2815 | AGUACGGCAACCUCUCCAACUUC | 2534 | 34404 | FLT4:2833L21 anti- | AGuuGGAGAGGuuGccGuATsT | 3640 |
| | | | | sense siNA (2815C) | | |
| | | | | stab08 | | |
| 3172 | UGGUGAAGAUCUGUGACUUUGGC | 2537 | 34405 | FLT4:3190L21 anti- | cAAAGucAcAGAucuucAcTsT | 3641 |
| | | | | sense siNA (3172C) | | |
| | | | | stab08 | | |
| 3176 | GAAGAUCUGUGACUUUGGCCUUG | 2538 | 34406 | FLT4:3194L21 anti- | AGGccAAAGucAcAGAucuTsT | 3642 |
| | | | | sense siNA (3176C) | | |
| | | | | stab08 | | |

VEGF

| | | | |
|---|---|---|---|
| Target | Seq | Cmpd | Seq |

| | | | | | | |
|---|---|---|---|---|---|---|
| Pos | Target | ID | # | Aliases | Sequence | ID |

| | | | | | | |
|---|---|---|---|---|---|---|
| 329 | GCAAGAGCUCCAGAGAGAAGUCG | 2539 | 32166 | VEGF:331U21 sense | AAGAGCUCCAGAGAGAAGUTT | 3643 |
| | | | | siNA | | |
| 414 | CAAAGUGAGUGACCUGCUUUUGG | 2540 | 32167 | VEGF:416U21 sense | AAGUGAGUGACCUGCUUUUTT | 3644 |
| | | | | siNA | | |
| 1151 | ACGAAGUGGUGAAGUUCAUGGAU | 2541 | 32168 | VEGF:1153U21 sense | GAAGUGGUGAAGUUCAUGGTT | 3645 |
| | | | | siNA | | |
| 1212 | GGUGGACAUCUUCCAGGAGUACC | 2542 | 32525 | VEGF:1214U21 sense | UGGACAUCUUCCAGGAGUATT | 3646 |
| | | | | siNA | | |
| 1213 | GUGGACAUCUUCCAGGAGUACCC | 2543 | 32526 | VEGF:1215U21 sense | GGACAUCUUCCAGGAGUACTT | 3647 |
| | | | | siNA | | |
| 1215 | GGACAUCUUCCAGGAGUACCCUG | 2544 | 32527 | VEGF:1217U21 sense | ACAUCUUCCAGGAGUACCCTT | 3648 |
| | | | | siNA | | |
| 1334 | AGUCCAACAUCACCAUGCAGAUU | 2545 | 32169 | VEGF:1336U21 sense | UCCAACAUCACCAUGCAGATT | 3649 |
| | | | | siNA | | |
| 1650 | CGAACGUACUUGCAGAUGUGACA | 2546 | 32540 | VEGF:1652U21 sense | AACGUACUUGCAGAUGUGATT | 3650 |
| | | | | siNA | | |
| 329 | GCAAGAGCUCCAGAGAGAAGUCG | 2539 | 32170 | VEGF:349L21 anti- | ACUUCUCUCUGGAGCUCUUTT | 3651 |
| | | | | sense siNA (331C) | | |
| 414 | CAAAGUGAGUGACCUGCUUUUGG | 2540 | 32171 | VEGF:434L21 anti- | AAAAGCAGGUCACUCACUUTT | 3652 |
| | | | | sense siNA (416C) | | |
| 1151 | ACGAAGUGGUGAAGUUCAUGGAU | 2541 | 32172 | VEGF:1171L21 anti- | CCAUGAACUUCACCACUUCTT | 3653 |
| | | | | sense siNA (1153C) | | |
| 1212 | GGUGGACAUCUUCCAGGAGUACC | 2542 | 32S43 | VEGF:1232L21 anti- | UACUCCUGGAAGAUGUCCATT | 3654 |
| | | | | sense siNA (1214C) | | |
| 1213 | GUGGACAUCUUCCAGGAGUACCC | 2543 | 32544 | VEGF:1233L21 anti- | GUACUCCUGGAAGAUGUCCTT | 3655 |
| | | | | sense siNA (1215C) | | |
| 1215 | GGACAUCUUCCAGGAGUACCCUG | 2544 | 32545 | VEGF:1235L21 anti- | GGGUACUCCUGGAAGAUGUTT | 3656 |
| | | | | sense siNA (1217C) | | |
| 1334 | AGUCCAACAUCACCAUGCAGAUU | 2545 | 32173 | VEGF:1354L21 anti- | UCUGCAUGGUGAUGUUGGATT | 3657 |
| | | | | sense siNA (1336C) | | |
| 1650 | CGAACGUACUUGCAGAUGUGACA | 2546 | 32558 | VEGF:1670L21 anti- | UCACAUCUGCAAGUACGUUTT | 3658 |
| | | | | sense siNA (1652C) | | |
| 329 | GCAAGAGCUCCAGAGAGAAGUCG | 2539 | | VEGF:331U21 sense | B AAGAGcuccAGAGAGAAGuTT B | 3659 |
| | | | | siNA stab04 | | |
| 414 | CAAAGUGAGUGACCUGCUUUUGG | 2540 | | VEGF:416U21 sense | B AAGuGAGuGAccuGcuuuuTT B | 3660 |
| | | | | siNA stab04 | | |
| 1151 | ACGAAGUGGUGAAGUUCAUGGAU | 2541 | | VEGF:1153U21 sense | B GAAGuGGuGAAGuucAuGGTT B | 3661 |
| | | | | siNA stab04 | | |
| 1212 | GGUGGACAUCUUCCAGGAGUACC | 2542 | | VEGF:1214U21 sense | B uGGAcAucuuccAGGAGuATT B | 3662 |
| | | | | siNA stab04 | | |
| 1213 | GUGGACAUCUUCCAGGAGUACCC | 2543 | | VEGF:1215U21 sense | B GGAcAucuuccAGGAGuAcTT B | 3663 |
| | | | | siNA stab04 | | |
| 1215 | GGACAUCUUCCAGGAGUACCCUG | 2544 | | VEGF:1217U21 sense | B AcAucuuccAGGAGuAcccTT B | 3664 |
| | | | | siNA stab04 | | |
| 1334 | AGUCCAACAUCACCAUGCAGAUU | 2545 | | VEGF:1336U21 sense | B uccAAcAucAccAuGcAGATT B | 3665 |
| | | | | siNA stab04 | | |
| 1650 | CGAACGUACUUGCAGAUGUGACA | 2546 | | VEGF:1652U21 sense | B AAcGuAcuuGcAGAuGuGATT B | 3666 |
| | | | | siNA stab04 | | |
| 329 | GCAAGAGCUCCAGAGAGAAGUCG | 2539 | | VEGF:349L21 anti- | AcuucucucuGGAGcucuuTsT | 3667 |
| | | | | sense siNA (331C) | | |
| | | | | stab05 | | |
| 414 | CAAAGUGAGUGACCUGCUUUUGG | 2540 | | VEGF:434L21 anti- | AAAAGcAGGucAcucAcuuTsT | 3668 |
| | | | | sense siNA (416C) | | |
| | | | | stab05 | | |
| 1151 | ACGAAGUGGUGAAGUUCAUGGAU | 2541 | | VEGF:1171L21 anti- | ccAuGAAcuucAccAcuucTsT | 3669 |
| | | | | sense siNA (1153C) | | |
| | | | | stab05 | | |
| 1212 | GGUGGACAUCUUCCAGGAGUACC | 2542 | | VEGF:1232L21 anti- | uAcuccuGGAAGAuGuccATsT | 3670 |
| | | | | sense siNA (1214C) | | |
| | | | | stab05 | | |
| 1213 | GUGGACAUCUUCCAGGAGUACCC | 2543 | | VEGF:1233L21 anti- | GuAcuccuGGAAGAuGuccTsT | 3671 |
| | | | | sense siNA (1215C) | | |
| | | | | stab05 | | |
| 1215 | GGACAUCUUCCAGGAGUACCCUG | 2544 | | VEGF:1235L21 anti- | GGGuAcuccuGGAAGAuGuTsT | 3672 |
| | | | | sense siNA (1217C) | | |
| | | | | stab05 | | |
| 1334 | AGUCCAACAUCACCAUGCAGAUU | 2545 | | VEGF:1354L21 anti- | ucuGcAuGGuGAuGuuGGATsT | 3673 |
| | | | | sense siNA (1336C) | | |
| | | | | stab05 | | |
| 1650 | CGAACGUACUUGCAGAUGUGACA | 2546 | | VEGF:1670L21 anti- | ucAcAucuGcAAGuAcGuuTsT | 3674 |
| | | | | sense siNA (1652C) | | |
| | | | | stab05 | | |
| 329 | GCAAGAGCUCCAGAGAGAAGUCG | 2539 | | VEGF:331U21 sense | B AAGAGcuccAGAGAGAAGuTT B | 3675 |
| | | | | siNA stab07 | | |
| 414 | CAAAGUGAGUGACCUGCUUUUGG | 2540 | | VEGF:416U21 sense | B AAGuGAGuGAccuGcuuuuTT B | 3676 |
| | | | | siNA stab07 | | |
| 1151 | ACGAAGUGGUGAAGUUCAUGGAU | 2541 | | VEGF:1153U21 sense | B GAAGuGGuGAAGuucAuGGTT B | 3677 |
| | | | | siNA stab07 | | |
| 1212 | GGUGGACAUCUUCCAGGAGUACC | 2542 | 33977 | VEGF:1214U21 sense | B uGGAcAucuuccAGGAGuATT B | 3678 |
| | | | | siNA stab07 | | |
| 1213 | GUGGACAUCUUCCAGGAGUACCC | 2543 | 33978 | VEGF:1215U21 sense | B GGAcAucuuccAGGAGuAcTT B | 3679 |
| | | | | siNA stab07 | | |
| 1215 | GGACAUCUUCCAGGAGUACCCUG | 2544 | | VEGF:1217U21 sense | B AcAucuuccAGGAGuAcccTT B | 3680 |
| | | | | siNA stab07 | | |
| 1334 | AGUCCAACAUCACCAUGCAGAUU | 2545 | | VEGF:1336U21 sense | B uccAAcAucAccAuGcAGATT B | 3681 |
| | | | | siNA stab07 | | |
| 1650 | CGAACGUACUUGCAGAUGUGACA | 2546 | | VEGF:1652U21 sense | B AAcGuAcuuGcAGAuGuGATT B | 3682 |
| | | | | siNA stab07 | | |
| 329 | GCAAGAGCUCCAGAGAGAAGUCG | 2539 | | VEGF:349L21 anti- | AcuucucucuGGAGcucuuTsT | 3683 |
| | | | | sense siNA (331C) | | |
| | | | | stab11 | | |
| 414 | CAAAGUGAGUGACCUGCUUUUGG | 2540 | | VEGF:434L21 anti- | AAAAGcAGGucAcucAcuuTsT | 3684 |
| | | | | sense siNA (416C) | | |
| | | | | stab11 | | |
| 1151 | ACGAAGUGGUGAAGUUCAUGGAU | 2541 | | VEGF:1171L21 anti- | ccAuGAAcuucAccAcuucTsT | 3685 |
| | | | | sense siNA (1153C) | | |
| | | | | stab11 | | |
| 1212 | GGUGGACAUCUUCCAGGAGUACC | 2542 | | VEGF:1232L21 anti- | uAcuccuGGAAGAuGuccATsT | 3686 |
| | | | | sense siNA (1214C) | | |
| | | | | stab11 | | |
| 1213 | GUGGACAUCUUCCAGGAGUACCC | 2543 | | VEGF:1233L21 anti- | GuAcuccuGGAAGAuGuccTsT | 3687 |
| | | | | sense siNA (1215C) | | |
| | | | | stab11 | | |
| 1215 | GGACAUCUUCCAGGAGUACCCUG | 2544 | | VEGF:1235L21 anti- | GGGuAcuccuGGAAGAuGuTsT | 3688 |
| | | | | sense siNA (1217C) | | |
| | | | | stab11 | | |
| 1334 | AGUCCAACAUCACCAUGCAGAUU | 2545 | | VEGF:1354L21 anti- | ucuGcAuGGuGAuGuuGGATsT | 3689 |
| | | | | sense siNA (1336C) | | |
| | | | | stab11 | | |
| 1650 | CGAACGUACUUGCAGAUGUGACA | 2546 | | VEGF:1670L21 anti- | ucAcAucuGcAAGuAcGuuTsT | 3690 |
| | | | | sense siNA (1652C) | | |
| | | | | stab11 | | |
| 329 | GCAAGAGCUCCAGAGAGAAGUCG | 2539 | | VEGF:331U21 sense | B AAGAGcuccAGAGAGAAGuTT B | 3691 |
| | | | | siNA stab18 | | |
| 414 | CAAAGUGAGUGACCUGCUUUUGG | 2540 | | VEGF:416U21 sense | B AAGuGAGuGAccuGcuuuuTT B | 3692 |
| | | | | siNA stab18 | | |
| 1151 | ACGAAGUGGUGAAGUUCAUGGAU | 2541 | | VEGF:1153U21 sense | B GAAGuGGuGAAGuucAuGGTT B | 3693 |
| | | | | siNA stab18 | | |
| 1212 | GGUGGACAUCUUCCAGGAGUACC | 2542 | | VEGF:1214U21 sense | B uGGAcAucuuccAGGAGuATT B | 3694 |
| | | | | siNA stab18 | | |
| 1213 | GUGGACAUCUUCCAGGAGUACCC | 2543 | | VEGF:1215U21 sense | B GGAcAucuuccAGGAGuAcTT B | 3695 |
| | | | | siNA stab18 | | |
| 1215 | GGACAUCUUCCAGGAGUACCCUG | 2544 | | VEGF:1217U21 sense | B AcAucuuccAGGAGuAcccTT B | 3696 |
| | | | | siNA stab18 | | |
| 1334 | AGUCCAACAUCACCAUGCAGAUU | 2545 | | VEGF:1336U21 sense | B uccAAcAucAccAuGcAGATT B | 3697 |
| | | | | siNA stab18 | | |
| 1650 | CGAACGUACUUGCAGAUGUGACA | 2546 | | VEGF:1652U21 sense | B AAcGuAcuuGcAGAuGuGATT 8 | 3698 |
| | | | | siNA stab18 | | |
| 329 | GCAAGAGCUCCAGAGAGAAGUCG | 2539 | | VEGF:349L21 anti- | AcuucucucuGGAGcucuuTsT | 3699 |
| | | | | sense siNA (331C) | | |
| | | | | stab08 | | |
| 414 | CAAAGUGAGUGACCUGCUUUUGG | 2540 | | VEGF:434L21 anti- | AAAAGcAGGucAcucAcuuTsT | 3700 |
| | | | | sense siNA (416C) | | |
| | | | | stab08 | | |
| 1151 | ACGAAGUGGUGAAGUUCAUGGAU | 2541 | | VEGF:1171L21 anti- | ccAuGAAcuucAccAcuucTsT | 3701 |
| | | | | sense siNA (1153C) | | |
| | | | | stab08 | | |
| 1212 | GGUGGACAUCUUCCAGGAGUACC | 2542 | 33983 | VEGF:1232L21 anti- | uAcuccuGGAAGAuGuccATsT | 3702 |
| | | | | sense siNA (1214C) | | |
| | | | | stab08 | | |
| 1213 | GUGGACAUCUUCCAGGAGUACCC | 2543 | 33984 | VEGF:1233L21 anti- | GuAcuccuGGAAGAuGuccTsT | 3703 |
| | | | | sense siNA (1215C) | | |
| | | | | stab08 | | |
| 1215 | GGACAUCUUCCAGGAGUACCCUG | 2544 | | VEGF:1235L21 anti- | GGGuAcuccuGGAAGAuGuTsT | 3704 |
| | | | | sense siNA (1217C) | | |
| | | | | stab08 | | |
| 1334 | AGUCCAACAUCACCAUGCAGAUU | 2545 | | VEGF:1354L21 anti- | ucuGcAuGGuGAuGuuGGATsT | 3705 |
| | | | | sense siNA (1336C) | | |
| | | | | stab08 | | |
| 1650 | CGAACGUACUUGCAGAUGUGACA | 2546 | | VEGF:1670L21 anti- | ucAcAucuGcAAGuAcGuuTsT | 3706 |
| | | | | sense siNA (1652C) | | |
| | | | | stab08 | | |
| 329 | GCAAGAGCUCCAGAGAGAAGUCG | 2539 | | VEGF:331U21 sense | B AAGAGCUCCAGAGAGAAGUTT B | 3707 |
| | | | | siNA stab09 | | |
| 414 | CAAAGUGAGUGACCUGCUUUUGG | 2540 | | VEGF:416U21 sense | B AAGUGAGUGACCUGCUUUTT B | 3708 |
| | | | | siNA stab09 | | |
| 1151 | ACGAAGUGGUGAAGUUCAUGGAU | 2541 | | VEGF:1153U21 sense | B GAAGUGGUGAAGUUCAUGGTT B | 3709 |
| | | | | siNA stab09 | | |
| 1212 | GGUGGACAUCUUCCAGGAGUACC | 2542 | 33965 | VEGF:1214U21 sense | B UGGACAUCUUCCAGGAGUATT B | 3710 |
| | | | | siNA stab09 | | |
| 1213 | GUGGACAUCUUCCAGGAGUACCC | 2543 | 33966 | VEGF:1215U21 sense | B GGACAUCUUCCAGGAGUACTT B | 3711 |
| | | | | siNA stab09 | | |
| 1215 | GGACAUCUUCCAGGAGUACCCUG | 2544 | | VEGF:1217U21 sense | B ACAUCUUCCAGGAGUACCCTT B | 3712 |
| | | | | siNA stab09 | | |
| 1334 | AGUCCAACAUCACCAUGCAGAUU | 2545 | | VEGF:1336U21 sense | B UCCAACAUCACCAUGCAGATT B | 3713 |
| | | | | siNA stab09 | | |
| 1650 | CGAACGUACUUGCAGAUGUGACA | 2546 | | VEGF:1652U21 sense | B AACGUACUUGCAGAUGUGATT B | 3714 |
| | | | | siNA stab09 | | |
| 329 | GCAAGAGCUCCAGAGAGAAGUCG | 2539 | | VEGF:349L21 anti- | ACUUCUCUCUGGAGCUCUUTsT | 3715 |
| | | | | sense siNA (331C) | | |
| | | | | stab10 | | |
| 414 | CAAAGUGAGUGACCUGCUUUUGG | 2540 | | VEGF:434L21 anti- | AAAAGCAGGUCACUCACUUTsT | 3716 |
| | | | | sense siNA (416C) | | |
| | | | | stab10 | | |
| 1151 | ACGAAGUGGUGAAGUUCAUGGAU | 2541 | | VEGF:1171L21 anti- | CCAUGAACUUCACCACUUCTsT | 3717 |
| | | | | sense siNA (1153C) | | |
| | | | | stab10 | | |
| 1212 | GGUGGACAUCUUCCAGGAGUACC | 2542 | 33971 | VEGF:1232L21 anti- | UACUCCUGGAAGAUGUCCATsT | 3718 |
| | | | | sense siNA (1214C) | | |
| | | | | stab10 | | |
| 1213 | GUGGACAUCUUCCAGGAGUACCC | 2543 | 33972 | VEGF:1233L21 anti- | GUACUCCUGGAAGAUGUCCTsT | 3719 |
| | | | | sense siNA (1215C) | | |
| | | | | stab10 | | |
| 1215 | GGACAUCUUCCAGGAGUACCCUG | 2544 | | VEGF:1235L21 anti- | GGGUACUCCUGGAAGAUGUTsT | 3720 |
| | | | | sense siNA (1217C) | | |
| | | | | stab10 | | |
| 1334 | AGUCCAACAUCACCAUGCAGAUU | 2545 | | VEGF:1354L21 anti- | UCUGCAUGGUGAUGUUGGATsT | 3721 |
| | | | | sense siNA (1336C) | | |
| | | | | stab10 | | |
| 1650 | CGAACGUACUUGCAGAUGUGACA | 2546 | | VEGF:1670L21 anti- | UCACAUCUGCAAGUACGUUTsT | 3722 |
| | | | | sense siNA (1652C) | | |
| | | | | stab10 | | |
| 329 | GCAAGAGCUCCAGAGAGAAGUCG | 2539 | | VEGF:349L21 anti- | AcuucucucuGGAGcucuuTT B | 3723 |
| | | | | sense siNA (331C) | | |
| | | | | stab19 | | |
| 414 | CAAAGUGAGUGACCUGCUUUUGG | 2540 | | VEGF:434L21 anti- | AAAAGcAGGucAcucAcuuTT B | 3724 |
| | | | | sense siNA (416C) | | |
| | | | | stab19 | | |
| 1151 | ACGAAGUGGUGAAGUUCAUGGAU | 2541 | | VEGF:1171L21 anti- | ccAuGAAcuucAccAcuucTTB | 3725 |
| | | | | sense siNA (1153C) | | |
| | | | | stab19 | | |
| 1212 | GGUGGACAUCUUCCAGGAGUACC | 2542 | | VEGF:1232L21 anti- | uAcuccuGGAAGAuGuccATT B | 3726 |
| | | | | sense siNA (1214C) | | |
| | | | | stab19 | | |
| 1213 | GUGGACAUCUUCCAGGAGUACCC | 2543 | | VEGF:1233L21 anti- | GuAcuccuGGAAGAuGuccTT B | 3727 |
| | | | | sense siNA (1215C) | | |
| | | | | stab19 | | |
| 1215 | GGACAUCUUCCAGGAGUACCCUG | 2544 | | VEGF:1235L21 anti- | GGGuAcuccuGGAAGAuGuTT B | 3728 |
| | | | | sense siNA (1217C) | | |
| | | | | stab19 | | |
| 1334 | AGUCCAACAUCACCAUGCAGAUU | 2545 | | VEGF:1354L21 anti- | ucuGcAuGGuGAuGuuGGATT B | 3729 |
| | | | | sense siNA (1336C) | | |
| | | | | stab19 | | |
| 1650 | CGAACGUACUUGCAGAUGUGACA | 2546 | | VEGF:1670L21 anti- | ucAcAucuGcAAGuAcGuuTT B | 3730 |
| | | | | sense siNA (1652C) | | |
| | | | | stab19 | | |
| 329 | GCAAGAGCUCCAGAGAGAAGUCG | 2539 | | VEGF:349L21 anti- | ACUUCUCUCUGGAGCUCUUTT B | 3731 |
| | | | | sense siNA (331C) | | |
| | | | | stab22 | | |
| 414 | CAAAGUGAGUGACCUGCUUUUGG | 2540 | | VEGF:434L21 anti- | AAAAGCAGGUCACUCACUUTT B | 3732 |
| | | | | sense siNA (416C) | | |
| | | | | stab22 | | |
| 1151 | ACGAAGUGGUGAAGUUCAUGGAU | 2541 | | VEGF:1171L21 anti- | CCAUGAACUUCACCACUUCTT B | 3733 |
| | | | | sense siNA (1153C) | | |
| | | | | stab22 | | |
| 1212 | GGUGGACAUCUUCCAGGAGUACC | 2542 | | VEGF:1232L21 anti- | UACUCCUGGAAGAUGUCCATT B | 3734 |
| | | | | sense siNA (1214C) | | |
| | | | | stab22 | | |
| 1213 | GUGGACAUCUUCCAGGAGUACCC | 2543 | | VEGF:1233L21 anti- | GUACUCCUGGAAGAUGUCCTT B | 3735 |
| | | | | sense siNA (1215C) | | |
| | | | | stab22 | | |
| 1215 | GGACAUCUUCCAGGAGUACCCUG | 2544 | | VEGF:1235L21 anti- | GGGUACUCCUGGAAGAUGUTT | 3736 |
| | | | | sense siNA (1217C) | | |
| | | | | stab22 | | |
| 1334 | AGUCCAACAUCACCAUGCAGAUU | 2545 | | VEGF:1354L21 anti- | UCUGCAUGGUGAUGUUGGATT B | 3737 |
| | | | | sense siNA (1336C) | | |
| | | | | stab22 | | |
| 1650 | CGAACGUACUUGCAGAUGUGACA | 2546 | | VEGF:1670L21 anti- | UCACAUCUGCAAGUACGUUTT B | 3738 |
| | | | | sense siNA (1652C) | | |
| | | | | stab22 | | |
| 1207 | AGACCCUGGUGGACAUCUUCCAG | 2547 | 32524 | VEGF:1207U21 sense | ACCCUGGUGGACAUCUUCCTT | 3739 |
| | | | | siNA stab00 | | |
| 1358 | UAUGCGGAUCAAACCUCACCAAG | 2548 | 32528 | VEGF:1358U21 sense | UGCGGAUCAAACCUCACCATT | 3740 |
| | | | | siNA stab00 | | |
| 1419 | AAAUGUGAAUGCAGACCAAAGAA | 2549 | 32529 | VEGF:1419U21 sense | AUGUGAAUGCAGACCAAAGTT | 3741 |
| | | | | siNA stab00 | | |
| 1420 | AAUGUGAAUGCAGACCAAAGAAA | 2550 | 32530 | VEGF:1420U21 sense | UGUGAAUGCAGACCAAAGATT | 3742 |
| | | | | siNA stab00 | | |
| 1421 | AUGUGAAUGCAGACCAAAGAAAG | 2551 | 32531 | VEGF:1421U21 sense | GUGAAUGCAGACCAAAGAATT | 3743 |
| | | | | siNA stab00 | | |
| 1423 | GUGAAUGCAGACCAAAGAAAGAU | 2552 | 32532 | VEGF:1423U21 sense | GAAUGCAGACCAAAGAAAGTT | 3744 |
| | | | | siNA stab00 | | |
| 1587 | CAGACGUGUAAAUGUUCCUGCAA | 2553 | 32533 | VEGF:1587U21 sense | GACGUGUAAAUGUUCCUGCTT | 3745 |
| | | | | siNA stab00 | | |
| 1591 | CGUGUAAAUGUUCCUGCAAAAAC | 2554 | 32534 | VEGF:1591U21 sense | UGUAAAUGUUCCUGCAAAATT | 3746 |
| | | | | siNA stab00 | | |
| 1592 | GUGUAAAUGUUCCUGCAAAAACA | 2555 | 32535 | VEGF:1592U21 sense | GUAAAUGUUCCUGCAAAAATT | 3747 |
| | | | | siNA stab00 | | |
| 1593 | UGUAAAUGUUCCUGCAAAAACAC | 2556 | 32536 | VEGF:1593U21 sense | UAAAUGUUCCUGCAAAAACTT | 3748 |
| | | | | siNA stab00 | | |
| 1594 | GUAAAUGUUCCUGCAAAAACACA | 2557 | 32537 | VEGF:1594U21 sense | AAAUGUUCCUGCAAAAACATT | 3749 |
| | | | | siNA stab00 | | |
| 1604 | CUGCAAAAACACAGACUCGCGUU | 2558 | 32538 | VEGF:1604U21 sense | GCAAAAACACAGACUCGCGTT | 3750 |
| | | | | siNA stab00 | | |
| 1637 | GCAGCUUGAGUUAAACGAACGUA | 2559 | 32539 | VEGF:1637U21 sense | AGCUUGAGUUAAACGAACGTT | 3751 |
| | | | | siNA stab00 | | |
| 1656 | CGUACUUGCAGAUGUGACAAGCC | 2560 | 32541 | VEGF:1656U21 sense | UACUUGCAGAUGUGACAAGTT | 3752 |
| | | | | siNA stab00 | | |
| 1207 | AGACCCUGGUGGACAUCUUCCAG | 2547 | 32542 | VEGF:1225L21 anti- | GGAAGAUGUCCACCAGGGUTT | 3753 |
| | | | | sense siNA (1207C) | | |
| | | | | stab00 | | |
| 1358 | UAUGCGGAUCAAACCUCACCAAG | 2548 | 32546 | VEGF:1376L21 anti- | UGGUGAGGUUUGAUCCGCATT | 3754 |
| | | | | sense siNA (1358C) | | |
| | | | | stab00 | | |
| 1419 | AAAUGUGAAUGCAGACCAAAGAA | 2549 | 32547 | VEGF:1437L21 anti- | CUUUGGUCUGCAUUCACAUTT | 3755 |
| | | | | sense siNA (1419C) | | |
| | | | | stab00 | | |
| 1420 | AAUGUGAAUGCAGACCAAAGAAA | 2550 | 32548 | VEGF:1438L21 anti- | UCUUUGGUCUGCAUUCACATT | 3756 |
| | | | | sense siNA (1420C) | | |
| | | | | stab00 | | |
| 1421 | AUGUGAAUGCAGACCAAAGAAAG | 2551 | 32549 | VEGF:1439L21 anti- | UUCUUUGGUCUGCAUUCACTT | 3757 |
| | | | | sense siNA (1421C) | | |
| | | | | stab00 | | |
| 1423 | GUGAAUGCAGACCAAAGAAAGAU | 2552 | 32550 | VEGF:1441L21 anti- | CUUUCUUUGGUCUGCAUUCTT | 3758 |
| | | | | sense siNA (1423C) | | |
| | | | | stab00 | | |
| 1587 | CAGACGUGUAAAUGUUCCUGCAA | 2553 | 32551 | VEGF:1605L21 anti- | GCAGGAACAUUUACACGUCTT | 3759 |
| | | | | sense siNA (1587C) | | |
| | | | | stab00 | | |
| 1591 | CGUGUAAAUGUUCCUGCAAAAAC | 2554 | 32552 | VEGF:1609L21 anti- | UUUUGCAGGAACAUUUACATT | 3760 |
| | | | | sense siNA (1591C) | | |
| | | | | stab00 | | |
| 1592 | GUGUAAAUGUUCCUGCAAAAACA | 2555 | 32553 | VEGF:1610L21 anti- | UUUUUGCAGGAACAUUUACTT | 3761 |
| | | | | sense siNA (1592C) | | |
| | | | | stab00 | | |
| 1593 | UGUAAAUGUUCCUGCAAAAACAC | 2556 | 32554 | VEGF:1611L21 anti- | GUUUUUGCAGGAACAUUUATT | 3762 |
| | | | | sense siNA (1593C) | | |
| | | | | stab00 | | |
| 1594 | GUAAAUGUUCCUGCAAAAACACA | 2557 | 32555 | VEGF:1612L21 anti- | UGUUUUUGCAGGAACAUUUTT | 3763 |
| | | | | sense siNA (1594C) | | |
| | | | | stab00 | | |
| 1604 | CUGCAAAAACACAGACUCGCGUU | 2558 | 32556 | VEGF:1622L21 anti- | CGCGAGUCUGUGUUUUUGCTT | 3764 |
| | | | | sense siNA (1604C) | | |
| | | | | stab00 | | |
| 1637 | GCAGCUUGAGUUAAACGAACGUA | 2559 | 32557 | VEGF:1655L21 anti- | CGUUCGUUUAACUCAAGCUTT | 3765 |
| | | | | sense siNA (1637C) | | |
| | | | | stab00 | | |
| 1656 | CGUACUUGCAGAUGUGACAAGCC | 2560 | 32559 | VEGF:1674L21 anti- | CUUGUCACAUCUGCAAGUATT | 3766 |
| | | | | sense siNA (1656C) | | |
| | | | | stab00 | | |
| 1206 | GAGACCCUGGUGGACAUCUUCCA | 2561 | 32560 | VEGF:1206U21 sense | GACCCUGGUGGACAUCUUCTT | 3767 |
| | | | | siNA stab00 | | |
| 1208 | GACCCUGGUGGACAUCUUCCAGG | 2562 | 32561 | VEGF:1208U21 sense | CCCUGGUGGACAUCUUCCATT | 3768 |
| | | | | siNA stab00 | | |
| 1551 | UCAGAGCGGAGAAAGCAUUUGUU | 2563 | 32562 | VEGF:1551U21 sense | AGAGCGGAGAAAGCAUUUGTT | 3769 |
| | | | | siNA stab00 | | |
| 1582 | AUCCGCAGACGUGUAAAUGUUCC | 2564 | 32563 | VEGF:1582U21 sense | CCGCAGACGUGUAAAUGUUTT | 3770 |
| | | | | siNA stab00 | | |
| 1584 | CCGCAGACGUGUAAAUGUUCCUG | 2565 | 32564 | VEGF:1584U21 sense | GCAGACGUGUAAAUGUUCCTT | 3771 |
| | | | | siNA stab00 | | |
| 1585 | CGCAGACGUGUAAAUGUUCCUGC | 2566 | 32565 | VEGF:1585U21 sense | CAGACGUGUAAAUGUUCCUTT | 3772 |
| | | | | siNA stab00 | | |
| 1589 | GACGUGUAAAUGUUCCUGCAAAA | 2567 | 32566 | VEGF:1589U21 sense | CGUGUAAAUGUUCCUGCAATT | 3773 |
| | | | | siNA stab00 | | |
| 1595 | UAAAUGUUCCUGCAAAAACACAG | 2568 | 32567 | VEGF:1595U21 sense | AAUGUUCCUGCAAAAACACTT | 3774 |
| | | | | siNA stab00 | | |
| 1596 | AAAUGUUCCUGCAAAAACACAGA | 2569 | 32568 | VEGF:1596U21 sense | AUGUUCCUGCAAAAACACATT | 3775 |
| | | | | siNA stab00 | | |
| 1602 | UCCUGCAAAAACACAGACUCGCG | 2570 | 32569 | VEGF:1602U21 sense | CUGCAAAAACACAGACUCGTT | 3776 |
| | | | | siNA stab00 | | |
| 1603 | CCUGCAAAAACACAGACUCGCGU | 2571 | 32570 | VEGF:1603U21 sense | UGCAAAAACACAGACUCGCTT | 3777 |
| | | | | siNA stab00 | | |
| 1630 | AGGCGAGGCAGCUUGAGUUAAAC | 2572 | 32571 | VEGF:1630U21 sense | GCGAGGCAGCUUGAGUUAATT | 3778 |
| | | | | siNA stab00 | | |
| 1633 | CGAGGCAGCUUGAGUUAAACGAA | 2573 | 32572 | VEGF:1633U21 sense | AGGCAGCUUGAGUUAAACGTT | 3779 |
| | | | | siNA stab00 | | |
| 1634 | GAGGCAGCUUGAGUUAAACGAAC | 2574 | 32573 | VEGF:1634U21 sense | GGCAGCUUGAGUUAAACGATT | 3780 |
| | | | | siNA stab00 | | |
| 1635 | AGGCAGCUUGAGUUAAACGAACG | 2575 | 32574 | VEGF:1635U21 sense | GCAGCUUGAGUUAAACGAATT | 3781 |
| | | | | siNA stab00 | | |
| 1636 | GGCAGCUUGAGUUAAACGAACGU | 2576 | 32575 | VEGF:1636U21 sense | CAGCUUGAGUUAAACGAACTT | 3782 |
| | | | | siNA stab00 | | |
| 1648 | UAAACGAACGUACUUGCAGAUGU | 2577 | 32576 | VEGF:1648U21 sense | AACGAACGUACUUGCAGAUTT | 3783 |
| | | | | siNA stab00 | | |
| 1649 | AAACGAACGUACUUGCAGAUGUG | 2578 | 32577 | VEGF:1649U21 sense | ACGAACGUACUUGCAGAUGTT | 3784 |
| | | | | siNA stab00 | | |
| 1206 | GAGACCCUGGUGGACAUCUUCCA | 2561 | 32578 | VEGF:1224L21 anti- | GAAGAUGUCCACCAGGGUCTT | 3785 |
| | | | | sense siNA (1206C) | | |
| | | | | stab00 | | |
| 1208 | GACCCUGGUGGACAUCUUCCAGG | 2562 | 32579 | VEGF:1226L21 anti- | UGGAAGAUGUCCACCAGGGTT | 3786 |
| | | | | sense siNA (1208C) | | |
| | | | | stab00 | | |
| 1551 | UCAGAGCGGAGAAAGCAUUUGUU | 2563 | 32580 | VEGF:1569L21 anti- | CAAAUGCUUUCUCCGCUCUTT | 3787 |
| | | | | sense siNA (1551C) | | |
| | | | | stab00 | | |
| 1582 | AUCCGCAGACGUGUAAAUGUUCC | 2564 | 32581 | VEGF:1600L21 anti- | AACAUUUACACGUCUGCGGTT | 3788 |
| | | | | sense siNA (1582C) | | |
| | | | | stab00 | | |
| 1584 | CCGCAGACGUGUAAAUGUUCCUG | 2565 | 32582 | VEGF:1602L21 anti- | GGAACAUUUACACGUCUGCTT | 3789 |
| | | | | sense siNA (1584C) | | |
| | | | | stab00 | | |
| 1585 | CGCAGACGUGUAAAUGUUCCUGC | 2566 | 32583 | VEGF:1603L21 anti- | AGGAACAUUUACACGUCUGTT | 3790 |
| | | | | sense siNA (1585C) | | |
| | | | | stab00 | | |
| 1589 | GACGUGUAAAUGUUCCUGCAAAA | 2567 | 32584 | VEGF:1607L21 anti- | UUGCAGGAACAUUUACACGTT | 3791 |
| | | | | sense siNA (1589C) | | |
| | | | | stab00 | | |
| 1595 | UAAAUGUUCCUGCAAAAACACAG | 2568 | 32585 | VEGF:1613L21 anti- | GUGUUUUUGCAGGAACAUUTT | 3792 |
| | | | | sense siNA (1595C) | | |
| | | | | stab00 | | |
| 1596 | AAAUGUUCCUGCAAAAACACAGA | 2569 | 32586 | VEGF:1614L21 anti- | UGUGUUUUUGCAGGAACAUTT | 3793 |
| | | | | sense siNA (1596C) | | |
| | | | | stab00 | | |
| 1602 | UCCUGCAAAAACACAGACUCGCG | 2570 | 32587 | VEGF:1620L21 anti- | CGAGUCUGUGUUUUUGCAGTT | 3794 |
| | | | | sense siNA (1602C) | | |
| | | | | stab00 | | |
| 1603 | CCUGCAAAAACACAGACUCGCGU | 2571 | 32588 | VEGF:1621L21 anti- | GCGAGUCUGUGUUUUUGCATT | 3795 |
| | | | | sense siNA (1603C) | | |
| | | | | stab00 | | |
| 1630 | AGGCGAGGCAGCUUGAGUUAAAC | 2572 | 32589 | VEGF:1648L21 anti- | UUAACUCAAGCUGCCUCGCTT | 3796 |
| | | | | sense siNA (1630C) | | |
| | | | | stab00 | | |
| 1633 | CGAGGCAGCUUGAGUUAAACGAA | 2573 | 32590 | VEGF:1651L21 anti- | CGUUUAACUCAAGCUGCCUTT | 3797 |
| | | | | sense siNA (1633C) | | |
| | | | | stab00 | | |
| 1634 | GAGGCAGCUUGAGUUAAACGAAC | 2574 | 32591 | VEGF:1652L21 anti- | UCGUUUAACUCAAGCUGCCTT | 3798 |
| | | | | sense siNA (1634C) | | |
| | | | | stab00 | | |
| 1635 | AGGCAGCUUGAGUUAAACGAACG | 2575 | 32592 | VEGF:1653L21 anti- | UUCGUUUAACUCAAGCUGCTT | 3799 |
| | | | | sense siNA (1635C) | | |
| | | | | stab00 | | |
| 1636 | GGCAGCUUGAGUUAAACGAACGU | 2576 | 32593 | VEGF:1654L21 anti- | GUUCGUUUAACUCAAGCUGTT | 3800 |
| | | | | sense siNA (1636C) | | |
| | | | | stab00 | | |
| 1648 | UAAACGAACGUACUUGCAGAUGU | 2577 | 32594 | VEGF:1666L21 anti- | AUCUGCAAGUACGUUCGUUTT | 3801 |
| | | | | sense siNA (1648C) | | |
| | | | | stab00 | | |
| 1649 | AAACGAACGUACUUGCAGAUGUG | 2578 | 32595 | VEGF:1667L21 anti- | CAUCUGCAAGUACGUUCGUTT | 3802 |
| | | | | sense siNA (1649C) | | |
| | | | | stab00 | | |
| 1358 | UAUGCGGAUCAAACCUCACCAAG | 2548 | 32968 | VEGF:1358U21 sense | B uGcGGAucAAAccucAccATT B | 3803 |
| | | | | siNA stab07 | | |
| 1419 | AAAUGUGAAUGCAGACCAAAGAA | 2549 | 32969 | VEGF:1419U21 sense | B AuGuGAAuGcAGAccAAAGTT B | 3804 |
| | | | | siNA stab07 | | |
| 1421 | AUGUGAAUGCAGACCAAAGAAAG | 2551 | 32970 | VEGF:1421U21 sense | B GuGAAuGcAGAccAAAGAATT B | 3805 |
| | | | | siNA stab07 | | |
| 1596 | AAAUGUUCCUGCAAAAACACAGA | 2569 | 32971 | VEGF:1596U21 sense | B AuGuuccuGcAAAAAcAcATT B | 3806 |
| | | | | siNA stab07 | | |
| 1636 | GGCAGCUUGAGUUAAACGAACGU | 2576 | 32972 | VEGF:1636U21 sense | B cAGcuuGAGuuAAAcGAAcTT B | 3807 |
| | | | | siNA stab07 | | |
| 1358 | UAUGCGGAUCAAACCUCACCAAG | 2548 | 32973 | VEGF:1376L21 anti- | uGGuGAGGuuuGAuccGcATsT | 3808 |
| | | | | sense siNA (1358C) | | |
| | | | | stab08 | | |
| 1419 | AAAUGUGAAUGCAGACCAAAGAA | 2549 | 32974 | VEGF:1437L21 anti- | cuuuGGucuGcAuucAcAuTsT | 3809 |
| | | | | sense siNA (1419C) | | |
| | | | | stab08 | | |
| 1421 | AUGUGAAUGCAGACCAAAGAAAG | 2551 | 32975 | VEGF:1439L21 anti- | uucuuuGGucuGcAuucAcTsT | 3810 |
| | | | | sense siNA (1421C) | | |
| | | | | stab08 | | |
| 1596 | AAAUGUUCCUGCAAAAACACAGA | 2569 | 32976 | VEGF:1614L21 anti- | uGuGuuuuuGcAGGAAcAuTsT | 3811 |
| | | | | sense siNA (1596C) | | |
| | | | | stab08 | | |
| 1636 | GGCAGCUUGAGUUAAACGAACGU | 2576 | 32977 | VEGF:1654L21 anti- | GuucGuuuAAcucAAGcuGTsT | 3812 |
| | | | | sense siNA (1636C) | | |
| | | | | stab08 | | |
| 1358 | UAUGCGGAUCAAACCUCACCAAG | 2548 | 32978 | VEGF:1358U21 sense | B UGCGGAUCAAACCUCACCATT B | 3813 |
| | | | | siNA stab09 | | |
| 1419 | AAAUGUGAAUGCAGACCAAAGAA | 2549 | 32979 | VEGF:1419U21 sense | B AUGUGAAUGCAGACCAAAGTT B | 3814 |
| | | | | siNA stab09 | | |
| 1421 | AUGUGAAUGCAGACCAAAGAAAG | 2551 | 32980 | VEGF:1421U21 sense | B GUGAAUGCAGACCAAAGAATT B | 3815 |
| | | | | siNA stab09 | | |
| 1596 | AAAUGUUCCUGCAAAAACACAGA | 2569 | 32981 | VEGF:1596U21 sense | B AUGUUCCUGCAAAAACACATT B | 3816 |
| | | | | siNA stab09 | | |
| 1636 | GGCAGCUUGAGUUAAACGAACGU | 2576 | 32982 | VEGF:1636U21 sense | B CAGCUUGAGUUAAACGAACTT B | 3817 |
| | | | | siNA stab09 | | |
| 1358 | UAUGCGGAUCAAACCUCACCAAG | 2548 | 32983 | VEGF:1376L21 anti- | UGGUGAGGUUUGAUCCGCATsT | 3818 |
| | | | | sense siNA (1358C) | | |
| | | | | stab10 | | |
| 1419 | AAAUGUGAAUGCAGACCAAAGAA | 2549 | 32984 | VEGF:1437L21 anti- | CUUUGGUCUGCAUUCACAUTsT | 3819 |
| | | | | sense siNA (1419C) | | |
| | | | | stab10 | | |
| 1421 | AUGUGAAUGCAGACCAAAGAAAG | 2551 | 32985 | VEGF:1439L21 anti- | UUCUUUGGUCUGCAUUCACTsT | 3820 |
| | | | | sense siNA (1421C) | | |
| | | | | stab10 | | |
| 1596 | AAAUGUUCCUGCAAAAACACAGA | 2569 | 32986 | VEGF:1614L21 anti- | UGUGUUUUUGCAGGAACAUTsT | 3821 |
| | | | | sense siNA (1596C) | | |
| | | | | stab10 | | |
| 1636 | GGCAGCUUGAGUUAAACGAACGU | 2576 | 32987 | VEGF:1654L21 anti- | GUUCGUUUAACUCAAGCUGTsT | 3822 |
| | | | | sense siNA (1636C) | | |
| | | | | stab10 | | |
| 1358 | UAUGCGGAUCAAACCUCACCAAG | 2548 | 32998 | VEGF:1358U21 sense | B AccAcuccAAAcuAGGcGuTT B | 3823 |
| | | | | siNA inv stab07 | | |
| 1419 | AAAUGUGAAUGCAGACCAAAGAA | 2549 | 32999 | VEGF:1419U21 sense | B GAAAccAGAcGuAAGuGuATT B | 3824 |
| | | | | siNA inv stab07 | | |
| 1421 | AUGUGAAUGCAGACCAAAGAAAG | 2551 | 33000 | VEGF:1421U21 sense | B AAGAAAccAGAcGuAAGuGTT B | 3825 |
| | | | | siNA inv stab07 | | |
| 1596 | AAAUGUUCCUGCAAAAACACAGA | 2569 | 33001 | VEGF:1596U21 sense | B AcAcAAAAAcGuccuuGuATT B | 3826 |
| | | | | siNA inv stab07 | | |
| 1636 | GGCAGCUUGAGUUAAACGAACGU | 2576 | 33002 | VEGF:1636U21 sense | B cAAGcAAAuuGAGuucGAcTT B | 3827 |
| | | | | siNA inv stab07 | | |
| 1358 | UAUGCGGAUCAAACCUCACCAAG | 2548 | 33003 | VEGF:1376L21 anti- | AcGccuAGuuuGGAGuGGuTsT | 3828 |
| | | | | sense siNA (1358C) | | |
| | | | | inv stab08 | | |
| 1419 | AAAUGUGAAUGCAGACCAAAGAA | 2549 | 33004 | VEGF:1437L21 anti- | uAcAcuuAcGucuGGuuucTsT | 3829 |
| | | | | sense siNA (1419C) | | |
| | | | | inv stab08 | | |
| 1421 | AUGUGAAUGCAGACCAAAGAAAG | 2551 | 33005 | VEGF:1439L21 anti- | cAcuuAcGucuGGuuucuuTsT | 3830 |
| | | | | sense siNA (1421C) | | |
| | | | | inv stab08 | | |
| 1596 | AAAUGUUCCUGCAAAAACACAGA | 2569 | 33006 | VEGF:1614L21 anti- | uAcAAGGAcGuuuuuGuGuTsT | 3831 |
| | | | | sense siNA (1596C) | | |
| | | | | inv stab08 | | |
| 1636 | GGCAGCUUGAGUUAAACGAACGU | 2576 | 33007 | VEGF:1654L21 anti- | GucGAAcucAAuuuGcuuGTsT | 3832 |
| | | | | sense siNA (1636C) | | |
| | | | | inv stab08 | | |
| 1358 | UAUGCGGAUCAAACCUCACCAAG | 2548 | 33008 | VEGF:1358U21 sense | B ACCACUCCAAACUAGGCGUTT B | 3833 |
| | | | | siNA inv stab09 | | |
| 1419 | AAAUGUGAAUGCAGACCAAAGAA | 2549 | 33009 | VEGF:1419U21 sense | B GAAACCAGACGUAAGUGUATT B | 3834 |
| | | | | siNA inv stab09 | | |
| 1421 | AUGUGAAUGCAGACCAAAGAAAG | 2551 | 33010 | VEGF:1421U21 sense | B AAGAAACCAGACGUAAGUGTT B | 3835 |
| | | | | siNA inv stab09 | | |
| 1596 | AAAUGUUCCUGCAAAAACACAGA | 2569 | 33011 | VEGF:1596U21 sense | B ACACAAAAACGUCCUUGUATT B | 3836 |
| | | | | siNA inv stab09 | | |
| 1636 | GGCAGCUUGAGUUAAACGAACGU | 2576 | 33012 | VEGF:1636U21 sense | B CAAGCAAAUUGAGUUCGACTT B | 3837 |
| | | | | siNA inv stab09 | | |
| 1358 | UAUGCGGAUCAAACCUCACCAAG | 2548 | 33013 | VEGF:1376L21 anti- | ACGCCUAGUUUGGAGUGGUTsT | 3838 |
| | | | | sense siNA (1358C) | | |
| | | | | inv stab10 | | |
| 1419 | AAAUGUGAAUGCAGACCAAAGAA | 2549 | 33014 | VEGF:1437L21 anti- | UACACUUACGUCUGGUUUCTsT | 3839 |
| | | | | sense siNA (1419C) | | |
| | | | | inv stab10 | | |
| 1421 | AUGUGAAUGCAGACCAAAGAAAG | 2551 | 33015 | VEGF:1439L21 anti- | CACUUACGUCUGGUUUCUUTsT | 3840 |
| | | | | sense siNA (1421C) | | |
| | | | | inv stab10 | | |
| 1596 | AAAUGUUCCUGCAAAAACACAGA | 2569 | 33016 | VEGF:1614L21 anti- | UACAAGGACGUUUUUGUGUTsT | 3841 |
| | | | | sense siNA (1596C) | | |
| | | | | inv stab10 | | |
| 1636 | GGCAGCUUGAGUUAAACGAACGU | 2576 | 33017 | VEGF:1654L21 anti- | GUCGAACUCAAUUUGCUUGTsT | 3842 |
| | | | | sense siNA (1636C) | | |
| | | | | inv stab10 | | |
| 1420 | AAUGUGAAUGCAGACCAAAGAAA | 2550 | 33968 | VEGF:1420U21 sense | B UGUGAAUGCAGACCAAAGATT B | 3843 |
| | | | | siNA stab09 | | |
| 1423 | GUGAAUGCAGACCAAAGAAAGAU | 2552 | 33970 | VEGF:1423U21 sense | B GAAUGCAGACCAAAGAAAGTT B | 3844 |
| | | | | siNA stab09 | | |
| 1420 | AAUGUGAAUGCAGACCAAAGAAA | 2550 | 33974 | VEGF:1438L21 anti- | UCUUUGGUCUGCAUUCACATsT | 3845 |
| | | | | sense siNA (1420C) | | |
| | | | | stab10 | | |
| 1423 | GUGAAUGCAGACCAAAGAAAGAU | 2552 | 33976 | VEGF:1441L21 anti- | CUUUCUUUGGUCUGCAUUCTsT | 3846 |
| | | | | sense siNA (1423C) | | |
| | | | | stab10 | | |
| 1420 | AAUGUGAAUGCAGACCAAAGAAA | 2550 | 33980 | VEGF:1420U21 sense | B uGuGAAuGcAGAccAAAGATT B | 3847 |
| | | | | siNA stab07 | | |
| 1423 | GUGAAUGCAGACCAAAGAAAGAU | 2552 | 33982 | VEGF:1423U21 sense | B GAAuGcAGAccAAAGAAAGTT B | 3848 |
| | | | | siNA stab07 | | |
| 1420 | AAUGUGAAUGCAGACCAAAGAAA | 2550 | 33986 | VEGF:1438L21 anti- | ucuuuGGucuGcAuucAcATsT | 3849 |
| | | | | sense siNA (1420C) | | |
| | | | | stab08 | | |
| 1423 | GUGAAUGCAGACCAAAGAAAGAU | 2552 | 33988 | VEGF:1441L21 anti- | cuuucuuuGGucuGcAuucTsT | 3850 |
| | | | | sense siNA (1423C) | | |
| | | | | stab08 | | |
| 1214 | GGUGGACAUCUUCCAGGAGUACC | 2542 | 33989 | VEGF:1214U21 sense | B AUGAGGACCUUCUACAGGUTT B | 3851 |
| | | | | siNA inv stab09 | | |
| 1215 | GUGGACAUCUUCCAGGAGUACCC | 2543 | 33990 | VEGF:1215U21 sense | B CAUGAGGACCUUCUACAGGTT B | 3852 |
| | | | | siNA inv stab09 | | |
| 1420 | AAUGUGAAUGCAGACCAAAGAAA | 2550 | 33992 | VEGF:1420U21 sense | B AGAAACCAGACGUAAGUGUTT B | 3853 |
| | | | | siNA inv stab09 | | |
| 1423 | GUGAAUGCAGACCAAAGAAAGAU | 2552 | 33994 | VEGF:1423U21 sense | B GAAAGAAACCAGACGUAAGTT B | 3854 |
| | | | | siNA inv stab09 | | |
| 1214 | GGUGGACAUCUUCCAGGAGUACC | 2542 | 33995 | VEGF:1232L21 anti- | ACCUGUAGAAGGUCCUCAUTsT | 3855 |
| | | | | sense siNA (1214C) | | |
| | | | | inv stab10 | | |
| 1215 | GUGGACAUCUUCCAGGAGUACCC | 2543 | 33996 | VEGF:1233L21 anti- | CCUGUAGAAGGUCCUCAUGTsT | 3856 |
| | | | | sense siNA (1215C) | | |
| | | | | inv stab10 | | |
| 1420 | AAUGUGAAUGCAGACCAAAGAAA | 2550 | 33998 | VEGF:1438L21 anti- | ACACUUACGUCUGGUUUCUTsT | 3857 |
| | | | | sense siNA (1420C) | | |
| | | | | inv stab10 | | |
| 1423 | GUGAAUGCAGACCAAAGAAAGAU | 2552 | 34000 | VEGF:1441L21 anti- | CUUACGUCUGGUUUCUUUCTsT | 3858 |
| | | | | sense siNA (1423C) | | |
| | | | | inv stab10 | | |
| 1214 | GGUGGACAUCUUCCAGGAGUACC | 2542 | 34001 | VEGF:1214U21 sense | B AuGAGGAccuucuAcAGGuTT B | 3859 |
| | | | | siNA inv stab07 | | |
| 1215 | GUGGACAUCUUCCAGGAGUACCC | 2543 | 34002 | VEGF:1215U21 sense | B cAuGAGGAccuucuAcAGGTT B | 3860 |
| | | | | siNA inv stab07 | | |
| 1420 | AAUGUGAAUGCAGACCAAAGAAA | 2550 | 34004 | VEGF:1420U21 sense | B AGAAAccAGAcGuAAGuGuTT B | 3861 |
| | | | | siNA inv stab07 | | |
| 1423 | GUGAAUGCAGACCAAAGAAAGAU | 2552 | 34006 | VEGF:1423U21 sense | B GAAAGAAAccAGAcGuAAGTT B | 3862 |
| | | | | siNA inv stab07 | | |
| 1214 | GGUGGACAUCUUCCAGGAGUACC | 2542 | 34007 | VEGF:1232L21 anti- | AccuGuAGAAGGuccucAuTsT | 3863 |
| | | | | sense siNA (1214C) | | |
| | | | | inv stab08 | | |
| 1215 | GUGGACAUCUUCCAGGAGUACCC | 2543 | 34008 | VEGF:1233L21 anti- | ccuGuAGAAGGuccucAuGTsT | 3864 |
| | | | | sense siNA (1215C) | | |
| | | | | inv stab08 | | |
| 1420 | AAUGUGAAUGCAGACCAAAGAAA | 2550 | 34010 | VEGF:1438L21 anti- | AcAcuuAcGucuGGuuucuTsT | 3865 |
| | | | | sense siNA (1420C) | | |
| | | | | inv stab08 | | |
| 1423 | GUGAAUGCAGACCAAAGAAAGAU | 2552 | 34012 | VEGF:1441L21 anti- | cuuAcGucuGGuuucuuucTsT | 3866 |
| | | | | sense siNA (1423C) | | |
| | | | | inv stab08 | | |
| 1366 | AAACCUCACCAAGGCCAGCACAU | 2579 | 34062 | VEGF:1366U21 sense | ACCUCACCAAGGCCAGCACTT | 3867 |
| | | | | siNA stab00 (HVEGF5) | | |
| 1366 | AAACCUCACCAAGGCCAGCACAU | 2579 | 34064 | VEGF:1384L21 anti- | GUGCUGGCCUUGGUGAGGUTT | 3868 |
| | | | | sense siNA (1366C) | | |
| | | | | stab00 (HVEGF5) | | |
| 1366 | AAACCUCACCAAGGCCAGCACAU | 2579 | 34066 | VEGF:1366U21 sense | B AccucAccAAGGccAGcAcTT B | 3869 |
| | | | | siNA stab07 (HVEGF5) | | |
| 1366 | AAACCUCACCAAGGCCAGCACAU | 2579 | 34068 | VEGF:1384L21 anti- | GuGcuGGccuuGGuGAGGuTsT | 3870 |
| | | | | sense siNA (1366C) | | |
| | | | | stab08 (HVEGF5) | | |
| 1366 | AAACCUCACCAAGGCCAGCACAU | 2579 | 34070 | VEGF:1366U21 sense | B ACCUCACCAAGGCCAGCACTT B | 3871 |
| | | | | siNA stab09 (HVEGF5) | | |
| 1366 | AAACCUCACCAAGGCCAGCACAU | 2579 | 34072 | VEGF:1384L21 anti- | GUGCUGGCCUUGGUGAGGUTsT | 3872 |
| | | | | sense siNA (1366C) | | |
| | | | | stab10 (HVEGF5) | | |
| 1366 | AAACCUCACCAAGGCCAGCACAU | 2579 | 34074 | VEGF:1366U21 sense | CACGACCGGAACCACUCCATT | 3873 |
| | | | | siNA inv stab00 | | |
| | | | | (HVEGFS) | | |
| 1366 | AAACCUCACCAAGGCCAGCACAU | 2579 | 34076 | VEGF:1384L21 anti- | UGGAGUGGUUCCGGUCGUGTT | 3874 |
| | | | | sense siNA (1366C) | | |
| | | | | inv stab00 (HVEGF5) | | |
| 1366 | AAACCUCACCAAGGCCAGCACAU | 2579 | 34078 | VEGF:1366U21 sense | B cAcGAccGGAAccAcuccATT B | 3875 |
| | | | | siNA inv stab07 | | |
| | | | | (HVEGF5) | | |
| 1366 | AAACCUCACCAAGGCCAGCACAU | 2579 | 34080 | VEGF:1384L21 anti- | uGGAGuGGuuccGGucGuGTsT | 3876 |
| | | | | sense siNA (1366C) | | |
| | | | | inv stab08 (HVEGF5) | | |
| 1366 | AAACCUCACCAAGGCCAGCACAU | 2579 | 34082 | VEGF:1366U21 sense | B CACGACCGGAACCACUCCATT B | 3877 |
| | | | | siNA inv stab09 | | |
| | | | | (HVEGF5) | | |
| 1366 | AAACCUCACCAAGGCCAGCACAU | 2579 | 34084 | VEGF:1384L21 anti- | UGGAGUGGUUCCGGUCGUGTsT | 3878 |
| | | | | sense siNA (1366C) | | |
| | | | | inv stab10 (HVEGF5) | | |
| 360 | AGAGAGACGGGGUCAGAGAGAGC | 2580 | 34681 | VEGF:360U21 sense | AGAGACGGGGUCAGAGAGATT | 3879 |
| | | | | siNA stab00 | | |
| 1562 | AAAGCAUUUGUUUGUACAAGAUC | 2581 | 34682 | VEGF:1562U21 sense | AGCAUUUGUUUGUACAAGATT | 3880 |
| | | | | siNA stab00 | | |
| 360 | AGAGAGACGGGGUCAGAGAGAGC | 2580 | 34689 | VEGF:378L21 (360C) | UCUCUCUGACCCCGUCUCUTT | 3881 |
| | | | | siRNA stab00 | | |
| 1562 | AAAGCAUUUGUUUGUACAAGAUC | 2581 | 34690 | VEGF:1580L21 (1562C) | UCUUGUACAAACAAAUGCUTT | 3882 |
| | | | | siRNA stab00 | | |
| 162 | UCCCUCUUCUUUUUUCUUAAACA | 2582 | 36002 | VEGF:162U21 sense | CCUCUUCUUUUUUCUUAAATT | 3883 |
| | | | | siNA stab00 | | |
| 163 | CCCUCUUCUUUUUUCUUAAACAU | 2583 | 36003 | VEGF:163U21 sense | CUCUUCUUUUUUCUUAAACTT | 3884 |
| | | | | siNA stab00 | | |
| 164 | CCUCUUCUUUUUUCUUAAACAUU | 2584 | 36004 | VEGF:164U21 sense | UCUUCUUUUUUCUUAAACATT | 3885 |
| | | | | siNA stab00 | | |
| 166 | UCUUCUUUUUUCUUAAACAUUUU | 2585 | 36005 | VEGF:166U21 sense | UUCUUUUUUCUUAAACAUUTT | 3886 |
| | | | | siNA stab00 | | |
| 169 | UCUUUUUUCUUAAACAUUUUUUU | 2586 | 36006 | VEGF:169U21 sense | UUUUUUCUUAAACAUUUUUTT | 3887 |
| | | | | siNA stab00 | | |
| 171 | UUUUUUCUUAAACAUUUUUUUUU | 2587 | 36007 | VEGF:171U21 sense | UUUUCUUAAACAUUUUUUUTT | 3888 |
| | | | | siNA stab00 | | |
| 172 | UUUUUCUUAAACAUUUUUUUUUA | 2588 | 36008 | VEGF:172U21 sense | UUUCUUAAACAUUUUUUUUTT | 3889 |
| | | | | siNA stab00 | | |
| 181 | AACAUUUUUUUUUAAAACUGUAU | 2589 | 36009 | VEGF:181U21 sense | CAUUUUUUUUUAAAACUGUTT | 3890 |
| | | | | siNA stab00 | | |
| 187 | UUUUUUUAAAACUGUAUUGUUUC | 2590 | 36010 | VEGF:187U21 sense | UUUUUAAAACUGUAUUGUUTT | 3891 |
| | | | | siNA stab00 | | |
| 188 | UUUUUUAAAACUGUAUUGUUUCU | 2591 | 36011 | VEGF:188U21 sense | UUUUAAAACUGUAUUGUUUTT | 3892 |
| | | | | siNA stab00 | | |
| 192 | UUAAAACUGUAUUGUUUCUCGUU | 2592 | 36012 | VEGF:192U21 sense | AAAACUGUAUUGUUUCUCGTT | 3893 |
| | | | | siNA stab00 | | |
| 202 | AUUGUUUCUCGUUUUAAUUUAUU | 2593 | 36013 | VEGF:202U21 sense | UGUUUCUCGUUUUAAUUUATT | 3894 |
| | | | | siNA stab00 | | |
| 220 | UUAUUUUUGCUUGCCAUUCCCCA | 2594 | 36014 | VEGF:220U21 sense | AUUUUUGCUUGCCAUUCCCTT | 3895 |
| | | | | siNA stab00 | | |
| 237 | UCCCCACUUGAAUCGGGCCGACG | 2595 | 36015 | VEGF:237U21 sense | CCCACUUGAAUCGGGCCGATT | 3896 |
| | | | | siNA stab00 | | |
| 238 | CCCCACUUGAAUCGGGCCGACGG | 2596 | 36016 | VEGF:238U21 sense | CCACUUGAAUCGGGCCGACTT | 3897 |
| | | | | siNA stab00 | | |
| 338 | CUCCAGAGAGAAGUCGAGGAAGA | 2597 | 36017 | VEGF:338U21 sense | CCAGAGAGAAGUCGAGGAATT | 3898 |
| | | | | siNA stab00 | | |
| 339 | UCCAGAGAGAAGUCGAGGAAGAG | 2598 | 36018 | VEGF:339U21 sense | CAGAGAGAAGUCGAGGAAGTT | 3899 |
| | | | | siNA stab00 | | |
| 371 | GUCAGAGAGAGCGCGCGGGCGUG | 2599 | 36019 | VEGF:371U21 sense | CAGAGAGAGCGCGCGGGCGTT | 3900 |
| | | | | siNA stab00 | | |
| 484 | GCAGCUGACCAGUCGCGCUGACG | 2600 | 36020 | VEGF:484U21 sense | AGCUGACCAGUCGCGCUGATT | 3901 |
| | | | | siNA stab00 | | |
| 598 | GGCCGGAGCCCGCGCCCGGAGGC | 2601 | 36021 | VEGF:598U21 sense | CCGGAGCCCGCGCCCGGAGTT | 3902 |
| | | | | siNA stab00 | | |
| 599 | GCCGGAGCCCGCGCCCGGAGGCG | 2602 | 36022 | VEGF:599U21 sense | CGGAGCCCGCGCCCGGAGGTT | 3903 |
| | | | | siNA stab00 | | |
| 600 | CCGGAGCCCGCGCCCGGAGGCGG | 2603 | 36023 | VEGF:600U21 sense | GGAGCCCGCGCCCGGAGGCTT | 3904 |
| | | | | siNA stab00 | | |
| 652 | CACUGAAACUUUUCGUCCAACUU | 2604 | 36024 | VEGF:652U21 sense | CUGAAACUUUUCGUCCAACTT | 3905 |
| | | | | siNA stab00 | | |
| 653 | ACUGAAACUUUUCGUCCAACUUC | 2605 | 36025 | VEGF:653U21 sense | UGAAACUUUUCGUCCAACUTT | 3906 |
| | | | | siNA stab00 | | |
| 654 | CUGAAACUUUUCGUCCAACUUCU | 2606 | 36026 | VEGF:654U21 sense | GAAACUUUUCGUCCAACUUTT | 3907 |
| | | | | siNA stab00 | | |
| 658 | AACUUUUCGUCCAACUUCUGGGC | 2607 | 36027 | VEGF:658U21 sense | CUUUUCGUCCAACUUCUGGTT | 3908 |
| | | | | siNA stab00 | | |
| 672 | CUUCUGGGCUGUUCUCGCUUCGG | 2608 | 36028 | VEGF:672U21 sense | UCUGGGCUGUUCUCGCUUCTT | 3909 |
| | | | | siNA stab00 | | |
| 674 | UCUGGGCUGUUCUCGCUUCGGAG | 2609 | 36029 | VEGF:674U21 sense | UGGGCUGUUCUCGCUUCGGTT | 3910 |
| | | | | siNA stab00 | | |
| 691 | UCGGAGGAGCCGUGGUCCGCGCG | 2610 | 36030 | VEGF:691U21 sense | GGAGGAGCCGUGGUCCGCGTT | 3911 |
| | | | | siNA stab00 | | |
| 692 | CGGAGGAGCCGUGGUCCGCGCGG | 2611 | 36031 | VEGF:692U21 sense | GAGGAGCCGUGGUCCGCGCTT | 3912 |
| | | | | siNA stab00 | | |
| 758 | CCGGGAGGAGCCGCAGCCGGAGG | 2612 | 36032 | VEGF:758U21 sense | GGGAGGAGCCGCAGCCGGATT | 3913 |
| | | | | siNA stab00 | | |
| 759 | CGGGAGGAGCCGCAGCCGGAGGA | 2613 | 36033 | VEGF:759U21 sense | GGAGGAGCCGCAGCCGGAGTT | 3914 |
| | | | | siNA stab00 | | |
| 760 | GGGAGGAGCCGCAGCCGGAGGAG | 2614 | 36034 | VEGF:760U21 sense | GAGGAGCCGCAGCCGGAGGTT | 3915 |
| | | | | siNA stab00 | | |
| 795 | GAAGAGAAGGAAGAGGAGAGGGG | 2615 | 36035 | VEGF:795U21 sense | AGAGAAGGAAGAGGAGAGGTT | 3916 |
| | | | | siNA stab00 | | |
| 886 | GUGCUCCAGCCGCGCGCGCUCCC | 2616 | 36036 | VEGF:886U21 sense | GCUCCAGCCGCGCGCGCUCTT | 3917 |
| | | | | siNA stab00 | | |
| 977 | GCCCCACAGCCCGAGCCGGAGAG | 2617 | 36037 | VEGF:977U21 sense | CCCACAGCCCGAGCCGGAGTT | 3918 |
| | | | | siNA stab00 | | |
| 978 | CCCCACAGCCCGAGCCGGAGAGG | 2618 | 36038 | VEGF:978U21 sense | CCACAGCCCGAGCCGGAGATT | 3919 |
| | | | | siNA stab00 | | |
| 1038 | ACCAUGAACUUUCUGCUGUCUUG | 2619 | 36039 | VEGF:1038U21 sense | CAUGAACUUUCUGCUGUCUTT | 3920 |
| | | | | siNA stab00 | | |
| 1043 | GAACUUUCUGCUGUCUUGGGUGC | 2620 | 36040 | VEGF:1043U21 sense | ACUUUCUGCUGUCUUGGGUTT | 3921 |
| | | | | siNA stab00 | | |
| 1049 | UCUGCUGUCUUGGGUGCAUUGGA | 2621 | 36041 | VEGF:1049U21 sense | UGCUGUCUUGGGUGCAUUGTT | 3922 |
| | | | | siNA stab00 | | |
| 1061 | GGUGCAUUGGAGCCUUGCCUUGC | 2622 | 36042 | VEGF:1061U21 sense | UGCAUUGGAGCCUUGCCUUTT | 3923 |
| | | | | siNA stab00 | | |
| 1072 | GCCUUGCCUUGCUGCUCUACCUC | 2623 | 36043 | VEGF:1072U21 sense | CUUGCCUUGCUGCUCUACCTT | 3924 |
| | | | | siNA stab00 | | |
| 1088 | UCACCUCCACCAUGCCAAGUGGU | 2624 | 36044 | VEGF:1088U21 sense | ACCUCCACCAUGCCAAGUGTT | 3925 |
| | | | | siNA stab00 | | |
| 1089 | CUCCUCCACCAUGCCAAGUGGUC | 2625 | 36045 | VEGF:1089U21 sense | CCUCCACCAUGCCAAGUGGTT | 3926 |
| | | | | siNA stab00 | | |
| 1095 | CACCAUGCCAAGUGGUCCCAGGC | 2626 | 36046 | VEGF:1095U21 sense | CCAUGCCAAGUGGUCCCAGTT | 3927 |
| | | | | siNA stab00 | | |
| 1110 | UCCCAGGCUGCACCCAUGGCAGA | 2627 | 36047 | VEGF:1110U21 sense | CCAGGCUGCACCCAUGGCATT | 3928 |
| | | | | siNA stab00 | | |
| 1175 | AUUCUAUCAGCGCAGCUACUGCC | 2628 | 36048 | VEGF:1175U21 sense | UCUAUCAGCGCAGCUACUGTT | 3929 |
| | | | | siNA stab00 | | |
| 1220 | CAUCUUCCAGGAGUACCCUGAUG | 2629 | 36049 | VEGF:1220U21 sense | UCUUCCAGGAGUACCCUGATT | 3930 |
| | | | | siNA stab00 | | |
| 1253 | CAUCUUCAAGCCAUCCUGUGUGC | 2630 | 36050 | VEGF:1253U21 sense | UCUUCAAGCCAUCCUGUGUTT | 3931 |
| | | | | siNA stab00 | | |
| 1300 | CUAAUGACGAGGGCCUGGAGUGU | 2631 | 36051 | VEGF:1300U21 sense | AAUGACGAGGGCCUGGAGUTT | 3932 |
| | | | | siNA stab00 | | |
| 1309 | CGGGCCUGGAGUGUGUGCCCACU | 2632 | 36052 | VEGF:1309U21 sense | GGCCUGGAGUGUGUGCCCATT | 3933 |
| | | | | siNA stab00 | | |
| 1326 | CCCACUGAGGAGUCCAACAUCAC | 2633 | 36053 | VEGF:1326U21 sense | CACUGAGGAGUCCAACAUCTT | 3934 |
| | | | | siNA stab00 | | |
| 1338 | UCCAACAUCACCAUGCAGAUUAU | 2634 | 36054 | VEGF:1338U21 sense | CAACAUCACCAUGCAGAUUTT | 3935 |
| | | | | siNA stab00 | | |
| 1342 | ACAUCACCAUGCAGAUUAUGCGG | 2635 | 36055 | VEGF:1342U21 sense | AUCACCAUGCAGAUUAUGCTT | 3936 |
| | | | | siNA stab00 | | |
| 1351 | UGCAGAUUAUGCGGAUCAAACCU | 2636 | 36056 | VEGF:1351U21 sense | CAGAUUAUGCGGAUCAAACTT | 3937 |
| | | | | siNA stab00 | | |
| 1352 | GCAGAUUAUGCGGAUCAAACCUC | 2637 | 36057 | VEGF:1352U21 sense | AGAUUAUGCGGAUCAAACCTT | 3938 |
| | | | | siNA stab00 | | |
| 1353 | CAGAUUAUGCGGAUCAAACCUCA | 2638 | 36058 | VEGF:1353U21 sense | GAUUAUGCGGAUCAAACCUTT | 3939 |
| | | | | siNA stab00 | | |
| 1389 | AUAGGAGAGAUGAGCUUCCUACA | 2639 | 36059 | VEGF:1389U21 sense | AGGAGAGAUGAGCUUCCUATT | 3940 |
| | | | | siNA stab00 | | |
| 1398 | GAGAGCUUCCUACAGCACAACAA | 2640 | 36060 | VEGF:1398U21 sense | GAGCUUCCUACAGCACAACTT | 3941 |
| | | | | siNA stab00 | | |
| 1401 | AGCUUCCUACAGCACAACAAAUG | 2641 | 36061 | VEGF:1401U21 sense | CUUCCUACAGCACAACAAATT | 3942 |
| | | | | siNA stab00 | | |
| 1407 | CCACAGCACAACAAAUGUGAAUG | 2642 | 36062 | VEGF:1407U21 sense | ACAGCACAACAAAUGUGAATT | 3943 |
| | | | | siNA stab00 | | |
| 1408 | UACAGCACAACAAAUGUGAAUGC | 2643 | 36063 | VEGF:1408U21 sense | CAGCACAACAAAUGUGAAUTT | 3944 |
| | | | | siNA stab00 | | |
| 1417 | ACAAAUGUGAAUGCAGACCAAAG | 2644 | 36064 | VEGF:1417U21 sense | AAAUGUGAAUGCAGACCAATT | 3945 |
| | | | | siNA stab00 | | |
| 162 | UCCCUCUUCUUUUUUCUUAAACA | 2582 | 36065 | VEGF:180L21 anti- | UUUAAGAAAAAAGAAGAGGTT | 3946 |
| | | | | sense siNA (162C) | | |
| | | | | stab00 | | |
| 163 | CCCUCUUCUUUUUUCUUAAACAU | 2583 | 36066 | VEGF:181L21 anti- | GUUUAAGAAAAAAGAAGAGTT | 3947 |
| | | | | sense siNA (163C) | | |
| | | | | stab00 | | |
| 164 | CCUCUUCUUUUUUCUUAAACAUU | 2584 | 36067 | VEGF:182L21 anti- | UGUUUAAGAAAAAAGAAGATT | 3948 |
| | | | | sense siNA (164C) | | |
| | | | | stab00 | | |
| 166 | UCUUCUUUUUUCUUAAACAUUUU | 2585 | 36068 | VEGF:184L21 anti- | AAUGUUUAAGAAAAAAGAATT | 3949 |
| | | | | sense siNA (166C) | | |
| | | | | stab00 | | |
| 169 | UCUUUUUUCUUAAACAUUUUUUU | 2586 | 36069 | VEGF:187L21 anti- | AAAAAUGUUUAAGAAAAAATT | 3950 |
| | | | | sense siNA (169C) | | |
| | | | | stab00 | | |
| 171 | UUUUUUCUUAAACAUUUUUUUUU | 2587 | 36070 | VEGF:189L21 anti- | AAAAAAAUGUUUAAGAAAATT | 3951 |
| | | | | sense siNA (171C) | | |
| | | | | stab00 | | |
| 172 | UUUUUCUUAAACAUUUUUUUUUA | 2588 | 36071 | VEGF:190L21 anti- | AAAAAAAAUGUUUAAGAAATT | 3952 |
| | | | | sense siNA (172C) | | |
| | | | | stab00 | | |
| 181 | AACAUUUUUUUUUAAAACUGUAU | 2589 | 36072 | VEGF:199L21 anti- | ACAGUUUUAAAAAAAAAUGTT | 3953 |
| | | | | sense siNA (181C) | | |
| | | | | stab00 | | |
| 187 | UUUUUUUAAAACUGUAUUGUUUC | 2590 | 36073 | VEGF:205L21 anti- | AACAAUACAGUUUUAAAAATT | 3954 |
| | | | | sense siNA (187C) | | |
| | | | | stab00 | | |
| 188 | UUUUUUAAAACUGUAUUGUUUCU | 2591 | 36074 | VEGF:206L21 anti- | AAACAAUACAGUUUUAAAATT | 3955 |
| | | | | sense siNA (188C) | | |
| | | | | stab00 | | |
| 192 | UUAAAACUGUAUUGUUUCUCGUU | 2592 | 36075 | VEGF:210L21 anti- | CGAGAAACAAUACAGUUUUTT | 3956 |
| | | | | sense siNA (192C) | | |
| | | | | stab00 | | |
| 202 | AUUGUUUCUCGUUUUAAUUUAUU | 2593 | 36076 | VEGF:220L21 anti- | UAAAUUAAAACGAGAAACATT | 3957 |
| | | | | sense siNA (202C) | | |
| | | | | stab00 | | |
| 220 | UUAUUUUUGCUUGCCAUUCCCCA | 2594 | 36077 | VEGF:238L21 anti- | GGGAAUGGCAAGCAAAAAUTT | 3958 |
| | | | | sense siNA (220C) | | |
| | | | | stab00 | | |
| 237 | UCCCCACUUGAAUCGGGCCGACG | 2595 | 36078 | VEGF:255L21 anti- | UCGGCCCGAUUCAAGUGGGTT | 3959 |
| | | | | sense siNA (237C) | | |
| | | | | stab00 | | |
| 238 | CCCCACUUGAAUCGGGCCGACGG | 2596 | 36079 | VEGF:256L21 anti- | GUCGGCCCGAUUCAAGUGGTT | 3960 |
| | | | | sense siNA (238C) | | |
| | | | | stab00 | | |
| 338 | CUCCAGAGAGAAGUCGAGGAAGA | 2597 | 36080 | VEGF:356L21 anti- | UUCCUCGACUUCUCUCUGGTT | 3961 |
| | | | | sense siNA (338C) | | |
| | | | | stab00 | | |
| 339 | UCCAGAGAGAAGUCGAGGAAGAG | 2598 | 36081 | VEGF:357L21 anti- | CUUCCUCGACUUCUCUCUGTT | 3962 |
| | | | | sense siNA (339C) | | |
| | | | | stab00 | | |
| 371 | GUCAGAGAGAGCGCGCGGGCGUG | 2599 | 36082 | VEGF:389L21 anti- | CGCCCGCGCGCUCUCUCUGTT | 3963 |
| | | | | sense siNA (371C) | | |
| | | | | stab00 | | |
| 484 | GCAGCUGACCAGUCGCGCUGACG | 2600 | 36083 | VEGF:502L21 anti- | UCAGCGCGACUGGUCAGCUTT | 3964 |
| | | | | sense siNA (484C) | | |
| | | | | stab00 | | |
| 598 | GGCCGGAGCCCGCGCCCGGAGGC | 2601 | 36084 | VEGF:616L21 anti- | CUCCGGGCGCGGGCUCCGGTT | 3965 |
| | | | | sense siNA (598C) | | |
| | | | | stab00 | | |
| 599 | GCCGGAGCCCGCGCCCGGAGGCG | 2602 | 36085 | VEGF:617L21 anti- | CCUCCGGGCGCGGGCUCCGTT | 3966 |
| | | | | sense siNA (599C) | | |
| | | | | stab00 | | |
| 600 | CCGGAGCCCGCGCCCGGAGGCGG | 2603 | 36086 | VEGF:618L21 anti- | GCCUCCGGGCGCGGGCUCCTT | 3967 |
| | | | | sense siNA (600C) | | |
| | | | | stab00 | | |
| 652 | CACUGAAACUUUUCGUCCAACUU | 2604 | 36087 | VEGF:670L21 anti- | GUUGGACGAAAAGUUUCAGTT | 3968 |
| | | | | sense siNA (652C) | | |
| | | | | stab00 | | |
| 653 | ACUGAAACUUUUCGUCCAACUUC | 2605 | 36088 | VEGF:671L21 anti- | AGUUGGACGAAAAGUUUCATT | 3969 |
| | | | | sense siNA (653C) | | |
| | | | | stab00 | | |
| 654 | CUGAAACUUUUCGUCCAACUUCU | 2606 | 36089 | VEGF:672L21 anti- | AAGUUGGACGAAAAGUUUCTT | 3970 |
| | | | | sense siNA (654C) | | |
| | | | | stab00 | | |
| 658 | AACUUUUCGUCCAACUUCUGGGC | 2607 | 36090 | VEGF:676L21 anti- | CCAGAAGUUGGACGAAAAGTT | 3971 |
| | | | | sense siNA (658C) | | |
| | | | | stab00 | | |
| 672 | CUUCUGGGCUGUUCUCGCUUCGG | 2608 | 36091 | VEGF:690L21 anti- | GAAGCGAGAACAGCCCAGATT | 3972 |
| | | | | sense siNA (672C) | | |
| | | | | stab00 | | |
| 674 | UCUGGGCUGUUCUCGCUUCGGAG | 2609 | 36092 | VEGF:692L21 anti- | CCGAAGCGAGAACAGCCCATT | 3973 |
| | | | | sense siNA (674C) | | |
| | | | | stab00 | | |
| 691 | UCGGAGGAGCCGUGGUCCGCGCG | 2610 | 36093 | VEGF:709L21 anti- | CGCGGACCACGGCUCCUCCTT | 3974 |
| | | | | sense siNA (691C) | | |
| | | | | stab00 | | |
| 692 | CGGAGGAGCCGUGGUCCGCGCGG | 2611 | 36094 | VEGF:710L21 anti- | GCGCGGACCACGGCUCCUCTT | 3975 |
| | | | | sense siNA (692C) | | |
| | | | | stab00 | | |
| 758 | CCGGGAGGAGCCGCAGCCGGAGG | 2612 | 36095 | VEGF:776L21 anti- | UCCGGCUGCGGCUCCUCCCTT | 3976 |
| | | | | sense siNA (758C) | | |
| | | | | stab00 | | |
| 759 | CGGGAGGAGCCGCAGCCGGAGGA | 2613 | 36096 | VEGF:777L21 anti- | CUCCGGCUGCGGCUCCUCCTT | 3977 |
| | | | | sense siNA (759C) | | |
| | | | | stab00 | | |
| 760 | GGGAGGAGCCGCAGCCGGAGGAG | 2614 | 36097 | VEGF:778L21 anti- | CCUCCGGCUGCGGCUCCUCTT | 3978 |
| | | | | sense siNA (760C) | | |
| | | | | stab00 | | |
| 795 | GAAGAGAAGGAAGAGGAGAGGGG | 2615 | 36098 | VEGF:813L21 anti- | CCUCUCCUCUUCCUUCUCUTT | 3979 |
| | | | | sense siNA (795C) | | |
| | | | | stab00 | | |
| 886 | GUGCUCCAGCCGCGCGCGCUCCC | 2616 | 36099 | VEGF:904L21 anti- | GAGCGCGCGCGGCUGGAGCTT | 3980 |
| | | | | sense siNA (886C) | | |
| | | | | stab00 | | |
| 977 | GCCCCACAGCCCGAGCCGGAGAG | 2617 | 36100 | VEGF:995L21 anti- | CUCCGGCUCGGGCUGUGGGTT | 3981 |
| | | | | sense siNA (977C) | | |
| | | | | stab00 | | |
| 978 | CCCCACAGCCCGAGCCGGAGAGG | 2618 | 36101 | VEGF:996L21 anti- | UCUCCGGCUCGGGCUGUGGTT | 3982 |
| | | | | sense siNA (978C) | | |
| | | | | stab00 | | |
| 1038 | ACCAUGAACUUUCUGCUGUCUUG | 2619 | 36102 | VEGF:1056L21 anti- | AGACAGCAGAAAGUUCAUGTT | 3983 |
| | | | | sense siNA (1038C) | | |
| | | | | stab00 | | |
| 1043 | GAACUUUCUGCUGUCUUGGGUGC | 2620 | 36103 | VEGF:1061L21 anti- | ACCCAAGACAGCAGAAAGUTT | 3984 |
| | | | | sense siNA (1043C) | | |
| | | | | stab00 | | |
| 1049 | UCUGCUGUCUUGGGUGCAUUGGA | 2621 | 36104 | VEGF:1067L21 anti- | CAAUGCACCCAAGACAGCATT | 3985 |
| | | | | sense siNA (1049C) | | |
| | | | | stab00 | | |
| 1061 | GGUGCAUUGGAGCCUUGCCUUGC | 2622 | 36105 | VEGF:1079L21 anti- | AAGGCAAGGCUCCAAUGCATT | 3986 |
| | | | | sense siNA (1061C) | | |
| | | | | stab00 | | |
| 1072 | GCCUUGCCUUGCUGCUCUACCUC | 2623 | 36106 | VEGF:1090L21 anti- | GGUAGAGCAGCAAGGCAAGTT | 3987 |
| | | | | sense siNA (1072C) | | |
| | | | | stab00 | | |
| 1088 | UCACCUCCACCAUGCCAAGUGGU | 2624 | 36107 | VEGF:1106L21 anti- | CACUUGGCAUGGUGGAGGUTT | 3988 |
| | | | | sense siNA (1088C) | | |
| | | | | stab00 | | |
| 1089 | CUCCUCCACCAUGCCAAGUGGUC | 2625 | 36108 | VEGF:1107L21 anti- | CCACUUGGCAUGGUGGAGGTT | 3989 |
| | | | | sense siNA (1089C) | | |
| | | | | stab00 | | |
| 1095 | CACCAUGCCAAGUGGUCCCAGGC | 2626 | 36109 | VEGF:1113L21 anti- | CUGGGACCACUUGGCAUGGTT | 3990 |
| | | | | sense siNA (1095C) | | |
| | | | | stab00 | | |
| 1110 | UCCCAGGCUGCACCCAUGGCAGA | 2627 | 36110 | VEGF:1128L21 anti- | UGCCAUGGGUGCAGCCUGGTT | 3991 |
| | | | | sense siNA (1110C) | | |
| | | | | stab00 | | |
| 1175 | AUUCUAUCAGCGCAGCUACUGCC | 2628 | 36111 | VEGF:1193L21 anti- | CAGUAGCUGCGCUGAUAGATT | 3992 |
| | | | | sense siNA (1175C) | | |
| | | | | stab00 | | |
| 1220 | CAUCUUCCAGGAGUACCCUGAUG | 2629 | 36112 | VEGF:1238L21 anti- | UCAGGGUACUCCUGGAAGATT | 3993 |
| | | | | sense siNA (1220C) | | |
| | | | | stab00 | | |
| 1253 | CAUCUUCAAGCCAUCCUGUGUGC | 2630 | 36113 | VEGF:1271L21 anti- | ACACAGGAUGGCUUGAAGATT | 3994 |
| | | | | sense siNA (1253C) | | |
| | | | | stab00 | | |
| 1300 | CUAAUGACGAGGGCCUGGAGUGU | 2631 | 36114 | VEGF:1318L21 anti- | ACUCCAGGCCCUCGUCAUUTT | 3995 |
| | | | | sense siNA (1300C) | | |
| | | | | stab00 | | |
| 1309 | CGGGCCUGGAGUGUGUGCCCACU | 2632 | 36115 | VEGF:1327L21 anti- | UGGGCACACACUCCAGGCCTT | 3996 |
| | | | | sense siNA (1309C) | | |
| | | | | stab00 | | |
| 1326 | CCCACUGAGGAGUCCAACAUCAC | 2633 | 36116 | VEGF:1344L21 anti- | GAUGUUGGACUCCUCAGUGTT | 3997 |
| | | | | sense siNA (1326C) | | |
| | | | | stab00 | | |
| 1338 | UCCAACAUCACCAUGCAGAUUAU | 2634 | 36117 | VEGF:1356L21 anti- | AAUCUGCAUGGUGAUGUUGTT | 3998 |
| | | | | sense siNA (1338C) | | |
| | | | | stab00 | | |
| 1342 | ACAUCACCAUGCAGAUUAUGCGG | 2635 | 36118 | VEGF:1360L21 anti- | GCAUAAUCUGCAUGGUGAUTT | 3999 |
| | | | | sense siNA (1342C) | | |
| | | | | stab00 | | |
| 1351 | UGCAGAUUAUGCGGAUCAAACCU | 2636 | 36119 | VEGF:1369L21 anti- | GUUUGAUCCGCAUAAUCUGTT | 4000 |
| | | | | sense siNA (1351C) | | |
| | | | | stab00 | | |
| 1352 | GCAGAUUAUGCGGAUCAAACCUC | 2637 | 36120 | VEGF:1370L21 anti- | GGUUUGAUCCGCAUAAUCUTT | 4001 |
| | | | | sense siNA (1352C) | | |
| | | | | stab00 | | |
| 1353 | CAGAUUAUGCGGAUCAAACCUCA | 2638 | 36121 | VEGF:1371L21 anti- | AGGUUUGAUCCGCAUAAUCTT | 4002 |
| | | | | sense siNA (1353C) | | |
| | | | | stab00 | | |
| 1389 | AUAGGAGAGAUGAGCUUCCUACA | 2639 | 36122 | VEGF:1407L21 anti- | UAGGAAGCUCAUCUCUCCUTT | 4003 |
| | | | | sense siNA (1389C) | | |
| | | | | stab00 | | |
| 1398 | GAGAGCUUCCUACAGCACAACAA | 2640 | 36123 | VEGF:1416L21 anti- | GUUGUGCUGUAGGAAGCUCTT | 4004 |
| | | | | sense siNA (1398C) | | |
| | | | | stab00 | | |
| 1401 | AGCUUCCUACAGCACAACAAAUG | 2641 | 36124 | VEGF:1419L21 anti- | UUUGUUGUGCUGUAGGAAGTT | 4005 |
| | | | | sense siNA (1401C) | | |
| | | | | stab00 | | |
| 1407 | CCACAGCACAACAAAUGUGAAUG | 2642 | 36125 | VEGF:1425L21 anti- | UUCACAUUUGUUGUGCUGUTT | 4006 |
| | | | | sense siNA (1407C) | | |
| | | | | stab00 | | |
| 1408 | UACAGCACAACAAAUGUGAAUGC | 2643 | 36126 | VEGF:1426L21 anti- | AUUCACAUUUGUUGUGCUGTT | 4007 |
| | | | | sense siNA (1408C) | | |
| | | | | stab00 | | |
| 1417 | ACAAAUGUGAAUGCAGACCAAAG | 2644 | 36127 | VEGF:1435L21 anti- | UUGGUCUGCAUUCACAUUUTT | 4008 |
| | | | | sense siNA (1417C) | | |
| | | | | stab00 | | |
| 1089 | UACCUCCACCAUGCCAAGUGGUC | 2645 | 37293 | VEGF:1089U21 sense | B ccuccAccAuGccAAGuGGTT B | 4009 |
| | | | | stab07 | | |
| 1090 | ACCUCCACCAUGCCAAGUGGUCC | 2646 | 37294 | VEGF:1090U21 sense | B cuccAccAuGccAAGuGGuTT B | 4010 |
| | | | | stab07 | | |
| 1095 | CACCAUGCCAAGUGGUCCCAGGC | 2626 | 37295 | VEGF:1095U21 sense | B ccAuGccAAGuGGucccAGTT B | 4011 |
| | | | | stab07 | | |
| 1096 | ACCAUGCCAAGUGGUCCCAGGCU | 2647 | 37296 | VEGF:1096U21 sense | B cAuGccAAGuGGucccAGGTT B | 4012 |
| | | | | stab07 | | |
| 1097 | CCAUGCCAAGUGGUCCCAGGCUG | 2648 | 37297 | VEGF:1097U21 sense | B AuGccAAGuGGucccAGGcTT B | 4013 |
| | | | | stab07 | | |
| 1098 | CAUGCCAAGUGGUCCCAGGCUGC | 2649 | 37298 | VEGF:1098U21 sense | B uGccAAGuGGucccAGGcuTT B | 4014 |
| | | | | stab07 | | |
| 1099 | AUGCCAAGUGGUCCCAGGCUGCA | 2650 | 37299 | VEGF:1099U21 sense | B GccAAGuGGucccAGGcuGTT B | 4015 |
| | | | | stab07 | | |
| 1100 | UGCCAAGUGGUCCCAGGCUGCAC | 2651 | 37300 | VEGF:1100U21 sense | B ccAAGuGGucccAGGcuGcTT B | 4016 |
| | | | | stab07 | | |
| 1104 | AAGUGGUCCCAGGCUGCACCCAU | 2652 | 37301 | VEGF:1104U21 sense | B GuGGucccAGGcuGcAcccTT B | 4017 |
| | | | | stab07 | | |
| 1105 | AGUGGUCCCAGGCUGCACCCAUG | 2653 | 37302 | VEGF:1105U21 sense | B uGGucccAGGcuGcAcccATT B | 4018 |
| | | | | stab07 | | |
| 1208 | GACCCUGGUGGACAUCUUCCAGG | 2562 | 37303 | VEGF:1208U21 sense | B cccuGGuGGAcAucuuccATT B | 4019 |
| | | | | stab07 | | |
| 1424 | UGAAUGCAGACCAAAGAAAGAUA | 2654 | 37304 | VEGF:1424U21 sense | B AAuGcAGAccAAAGAAAGATT B | 4020 |
| | | | | stab07 | | |
| 1549 | GCUCAGAGCGGAGAAAGCAUUUG | 2655 | 37305 | VEGF:1549U21 sense | B ucAGAGcGGAGAAAGcAuuTT B | 4021 |
| | | | | stab07 | | |
| 1584 | CCGCAGACGUGUAAAUGUUCCUG | 2565 | 37306 | VEGF:1584U21 sense | B GcAGAcGuGuAAAuGuuccTT B | 4022 |
| | | | | stab07 | | |
| 1585 | CGCAGACGUGUAAAUGUUCCUGC | 2566 | 37307 | VEGF:1585U21 sense | B cAGAcGuGuAAAuGuuccuTT B | 4023 |
| | | | | stab07 | | |
| 1589 | GACGUGUAAAUGUUCCUGCAAAA | 2567 | 37308 | VEGF:1589U21 sense | B cGuGuAAAuGuuccuGcAATT B | 4024 |
| | | | | stab07 | | |
| 1591 | CGUGUAAAUGUUCCUGCAAAAAC | 2554 | 37309 | VEGF:1591U21 sense | B uGuAAAuGuuccuGcAAAATT B | 4025 |
| | | | | stab07 | | |
| 1592 | GUGUAAAUGUUCCUGCAAAAACA | 2555 | 37310 | VEGF:1592U21 sense | B GuAAAuGuuccuGcAAAAATT B | 4026 |
| | | | | stab07 | | |
| 1593 | UGUAAAUGUUCCUGCAAAAACAC | 2556 | 37311 | VEGF:1593U21 sense | B uAAAuGuuccuGcAAAAAcTT B | 4027 |
| | | | | stab07 | | |
| 1594 | GUAAAUGUUCCUGCAAAAACACA | 2557 | 37312 | VEGF:1594U21 sense | B AAAuGuuccuGcAAAAAcATT B | 4028 |
| | | | | stab07 | | |
| 1595 | UAAAUGUUCCUGCAAAAACACAG | 2568 | 37313 | VEGF:1595U21 sense | B AAuGuuccuGcAAAAAcAcTT B | 4029 |
| | | | | stab07 | | |
| 1597 | AAUGUUCCUGCAAAAACACAGAC | 2656 | 37314 | VEGF:1597U21 sense | B uGuuccuGcAAAAAcAcAGTT B | 4030 |
| | | | | stab07 | | |
| 1598 | AUGUUCCUGCAAAAACACAGACU | 2657 | 37315 | VEGF:1598U21 sense | B GuuccuGcAAAAAcAcAGATT B | 4031 |
| | | | | stab07 | | |
| 1599 | UGUUCCUGCAAAAACACAGACUC | 2658 | 37316 | VEGF:1599U21 sense | B uuccuGcAAAAAcAcAGAcTT B | 4032 |
| | | | | stab07 | | |
| 1600 | GUUCCUGCAAAAACACAGACUCG | 2659 | 37317 | VEGF:1600U21 sense | B uccuGcAAAAAcAcAGAcuTT B | 4033 |
| | | | | stab07 | | |
| 1604 | CUGCAAAAACACAGACUCGCGUU | 2558 | 37318 | VEGF:1604U21 sense | B GcAAAAAcAcAGAcucGcGTT B | 4034 |
| | | | | stab07 | | |
| 1605 | UGCAAAAACACAGACUCGCGUUG | 2660 | 37319 | VEGF:1605U21 sense | B cAAAAAcAcAGAcucGcGuTT B | 4035 |
| | | | | stab07 | | |
| 1608 | AAAAACACAGACUCGCGUUGCAA | 2661 | 37320 | VEGF:1608U21 sense | B AAAcAcAGAcucGcGuuGcTT B | 4036 |
| | | | | stab07 | | |
| 1612 | ACACAGACUCGCGUUGCAAGGCG | 2662 | 37321 | VEGF:1612U21 sense | B AcAGAcucGcGuuGcAAGGTT B | 4037 |
| | | | | stab07 | | |
| 1616 | AGACUCGCGUUGCAAGGCGAGGC | 2663 | 37322 | VEGF:1616U21 sense | B AcucGcGuuGcAAGGcGAGTT B | 4038 |
| | | | | stab07 | | |
| 1622 | GCGUUGCAAGGCGAGGCAGCUUG | 2664 | 37323 | VEGF:1622U21 sense | B GuuGcAAGGcGAGGcAGcuTT B | 4039 |
| | | | | stab07 | | |
| 1626 | UGCAAGGCGAGGCAGCUUGAGUU | 2665 | 37324 | VEGF:1626U21 sense | B cAAGGcGAGGcAGcuuGAGTT B | 4040 |
| | | | | stab07 | | |
| 1628 | CAAGGCGAGGCAGCUUGAGUUAA | 2666 | 37325 | VEGF:1628U21 sense | B AGGcGAGGcAGcuuGAGuuTT B | 4041 |
| | | | | stab07 | | |
| 1633 | CGAGGCAGCUUGAGUUAAACGAA | 2573 | 37326 | VEGF:1633U21 sense | B AGGcAGcuuGAGuuAAAcGTT B | 4042 |
| | | | | stab07 | | |
| 1634 | GAGGCAGCUUGAGUUAAACGAAC | 2574 | 37327 | VEGF:1634U21 sense | B GGcAGcuuGAGuuAAAcGATT B | 4043 |
| | | | | stab07 | | |
| 1635 | AGGCAGCUUGAGUUAAACGAACG | 2575 | 37328 | VEGF:1635U21 sense | B GcAGcuuGAGuuAAAcGAATT B | 4044 |
| | | | | stab07 | | |
| 1637 | GCAGCUUGAGUUAAACGAACGUA | 2559 | 37329 | VEGF:1637U21 sense | B AGcuuGAGuuAAAcGAAcGTT B | 4045 |
| | | | | stab07 | | |
| 1643 | UGAGUUAAACGAACGUACUUGCA | 2667 | 37330 | VEGF:1643U21 sense | B AGuuAAAcGAAcGuAcuuGTT B | 4046 |
| | | | | stab07 | | |
| 1645 | AGUUAAACGAACGUACUUGCAGA | 2668 | 37331 | VEGF:1645U21 sense | B uuAAAcGAAcGuAcuuGcATT B | 4047 |
| | | | | stab07 | | |
| 1646 | GUUAAACGAACGUACUUGCAGAU | 2669 | 37332 | VEGF:1646U21 sense | B uAAAcGAAcGuAcuuGcAGTT B | 4048 |
| | | | | stab07 | | |
| 1647 | UUAAACGAACGUACUUGCAGAUG | 2670 | 37333 | VEGF:1647U21 sense | B AAAcGAAcGuAcuuGcAGATT B | 4049 |
| | | | | stab07 | | |
| 1648 | UAAACGAACGUACUUGCAGAUGU | 2577 | 37334 | VEGF:1648U21 sense | B AAcGAAcGuAcuuGcAGAuTT B | 4050 |
| | | | | stab07 | | |
| 1655 | ACGUACUUGCAGAUGUGACAAGC | 2671 | 37335 | VEGF:1655U21 sense | B GuAcuuGcAGAuGuGAcAATT B | 4051 |
| | | | | stab07 | | |
| 1656 | CGUACUUGCAGAUGUGACAAGCC | 2560 | 37336 | VEGF:1656U21 sense | B uAcuuGcAGAuGuGAcAAGTT B | 4052 |
| | | | | stab07 | | |
| 1657 | GUACUUGCAGAUGUGACAAGCCG | 2672 | 37337 | VEGF:1657U21 sense | B AcuuGcAGAuGuGAcAAGcTT B | 4053 |
| | | | | stab07 | | |
| 1089 | UACCUCCACCAUGCCAAGUGGUC | 2645 | 37338 | VEGF:1107L21 anti- | CCAcuuGGcAuGGuGGAGGTT | 4054 |
| | | | | sense siNA (1089C) | | |
| | | | | stab26 | | |
| 1090 | ACCUCCACCAUGCCAAGUGGUCC | 2646 | 37339 | VEGF:1108L21 anti- | ACCAcuuGGcAuGGuGGAGTT | 4055 |
| | | | | sense siNA (1090C) | | |
| | | | | stab26 | | |
| 1095 | CACCAUGCCAAGUGGUCCCAGGC | 2626 | 37340 | VEGF:1113L21 anti- | CUGGGAccAcuuGGcAuGGTT | 4056 |
| | | | | sense siNA (1095C) | | |
| | | | | stab26 | | |
| 1096 | ACCAUGCCAAGUGGUCCCAGGCU | 2647 | 37341 | VEGF:1114L21 anti- | CCUGGGAccAcuuGGcAuGTT | 4057 |
| | | | | sense siNA (1096C) | | |
| | | | | stab26 | | |
| 1097 | CCAUGCCAAGUGGUCCCAGGCUG | 2648 | 37342 | VEGF:1115L21 anti- | GCCuGGGAccAcuuGGcAuTT | 4058 |
| | | | | sense siNA (1097C) | | |
| | | | | stab26 | | |
| 1098 | CAUGCCAAGUGGUCCCAGGCUGC | 2649 | 37343 | VEGF:1116L21 anti- | AGCcuGGGAccAcuuGGcATT | 4059 |
| | | | | sense siNA (1098C) | | |
| | | | | stab26 | | |
| 1099 | AUGCCAAGUGGUCCCAGGCUGCA | 2650 | 37344 | VEGF:1117L21 anti- | CAGccuGGGAccAcuuGGcTT | 4060 |
| | | | | sense siNA (1099C) | | |
| | | | | stab26 | | |
| 1100 | UGCCAAGUGGUCCCAGGCUGCAC | 2651 | 37345 | VEGF:1118L21 anti- | GCAGccuGGGAccAcuuGGTT | 4061 |
| | | | | sense siNA (1100C) | | |
| | | | | stab26 | | |
| 1104 | AAGUGGUCCCAGGCUGCACCCAU | 2652 | 37346 | VEGF:1122L21 anti- | GGGuGcAGccuGGGAccAcTT | 4062 |
| | | | | sense siNA (1104C) | | |
| | | | | stab26 | | |
| 1105 | AGUGGUCCCAGGCUGCACCCAUG | 2653 | 37347 | VEGF:1123L21 anti- | UGGGuGcAGccuGGGAccATT | 4063 |
| | | | | sense siNA (1105C) | | |
| | | | | stab26 | | |
| 1208 | GACCCUGGUGGACAUCUUCCAGG | 2562 | 37348 | VEGF:1226L21 anti- | UGGAAGAuGuccAccAGGGTT | 4064 |
| | | | | sense siNA (1208C) | | |
| | | | | stab26 | | |
| 1214 | GGUGGACAUCUUCCAGGAGUACC | 2542 | 37349 | VEGF:1232L21 anti- | UACuccuGGAAGAuGuccATT | 4065 |
| | | | | sense siNA (1214C) | | |
| | | | | stab26 | | |
| 1421 | AUGUGAAUGCAGACCAAAGAAAG | 2551 | 37350 | VEGF:1439L21 anti- | UUCuuuGGucuGcAuucAcTT | 4066 |
| | | | | sense siNA (1421C) | | |
| | | | | stab26 | | |
| 1423 | GUGAAUGCAGACCAAAGAAAGAU | 2552 | 37351 | VEGF:1441L21 anti- | CUUucuuuGGucuGcAuucTT | 4067 |
| | | | | sense siNA (1423C) | | |
| | | | | stab26 | | |
| 1424 | UGAAUGCAGACCAAAGAAAGAUA | 2654 | 37352 | VEGF:1442L21 anti- | UCUuucuuuGGucuGcAuuTT | 4068 |
| | | | | sense siNA (1424C) | | |
| | | | | stab26 | | |
| 1549 | GCUCAGAGCGGAGAAAGCAUUUG | 2655 | 37353 | VEGF:1567L21 anti- | AAUGcuuucuccGcucuGATT | 4069 |
| | | | | sense siNA (1549C) | | |
| | | | | stab26 | | |
| 1584 | CCGCAGACGUGUAAAUGUUCCUG | 2565 | 37354 | VEGF:1602L21 anti- | GGAAcAuuuAcAcGucuGcTT | 4070 |
| | | | | sense siNA (1584C) | | |
| | | | | stab26 | | |
| 1585 | CGCAGACGUGUAAAUGUUCCUGC | 2566 | 37355 | VEGF:1603L21 anti- | AGGAAcAuuuAcAcGucuGTT | 4071 |
| | | | | sense siNA (1585C) | | |
| | | | | stab26 | | |
| 1589 | GACGUGUAAAUGUUCCUGCAAAA | 2567 | 37356 | VEGF:1607L21 anti- | UUGcAGGAAcAuuuAcAcGTT | 4072 |
| | | | | sense siNA (1589C) | | |
| | | | | stab26 | | |
| 1591 | CGUGUAAAUGUUCCUGCAAAAAC | 2554 | 37357 | VEGF:1609L21 anti- | UUUuGcAGGAAcAuuuAcATT | 4073 |
| | | | | sense siNA (1591C) | | |
| | | | | stab26 | | |
| 1592 | GUGUAAAUGUUCCUGCAAAAACA | 2555 | 37358 | VEGF:1610L21 anti- | UUUuuGcAGGAAcAuuuAcTT | 4074 |
| | | | | sense siNA (1592C) | | |
| | | | | stab26 | | |
| 1593 | UGUAAAUGUUCCUGCAAAAACAC | 2556 | 37359 | VEGF:1611L21 anti- | GUUuuuGcAGGAAcAuuuATT | 4075 |
| | | | | sense siNA (1593C) | | |
| | | | | stab26 | | |
| 1594 | GUAAAUGUUCCUGCAAAAACACA | 2557 | 37360 | VEGF:1612L21 anti- | UGUuuuuGcAGGAAcAuuuTT | 4076 |
| | | | | sense siNA (1594C) | | |
| | | | | stab26 | | |
| 1595 | UAAAUGUUCCUGCAAAAACACAG | 2568 | 37361 | VEGF:1613L21 anti- | GUGuuuuuGcAGGAAcAuuTT | 4077 |
| | | | | sense siNA (1595C) | | |
| | | | | stab26 | | |
| 1597 | AAUGUUCCUGCAAAAACACAGAC | 2656 | 37362 | VEGF:1615L21 anti- | CUGuGuuuuuGcAGGAAcATT | 4078 |
| | | | | sense siNA (1597C) | | |
| | | | | stab26 | | |
| 1598 | AUGUUCCUGCAAAAACACAGACU | 2657 | 37363 | VEGF:1616L21 anti- | UCUGuGuuuuuGcAGGAAcTT | 4079 |
| | | | | sense siNA (1598C) | | |
| | | | | stab26 | | |
| 1599 | UGUUCCUGCAAAAACACAGACUC | 2658 | 37364 | VEGF:1617L21 anti- | GUCuGuGuuuuuGcAGGAATT | 4080 |
| | | | | sense siNA (1599C) | | |
| | | | | stab26 | | |
| 1600 | GUUCCUGCAAAAACACAGACUCG | 2659 | 37365 | VEGF:1618L21 anti- | AGUcuGuGuuuuuGcAGGATT | 4081 |
| | | | | sense siNA (1600C) | | |
| | | | | stab26 | | |
| 1604 | CUGCAAAAACACAGACUCGCGUU | 2558 | 37366 | VEGF:1622L21 anti- | CGCGAGucuGuGuuuuuGcTT | 4082 |
| | | | | sense siNA (1604C) | | |
| | | | | stab26 | | |
| 1605 | UGCAAAAACACAGACUCGCGUUG | 2660 | 37367 | VEGF:1623L21 anti- | ACGcGAGucuGuGuuuuuGTT | 4083 |
| | | | | sense siNA (1605C) | | |
| | | | | stab26 | | |
| 1608 | AAAAACACAGACUCGCGUUGCAA | 2661 | 37368 | VEGF:1626L21 anti- | GCAAcGcGAGucuGuGuuuTT | 4084 |
| | | | | sense siNA (1608C) | | |
| | | | | stab26 | | |
| 1612 | ACACAGACUCGCGUUGCAAGGCG | 2662 | 37369 | VEGF:1630L21 anti- | CCUuGcAAcGcGAGucuGuTT | 4085 |
| | | | | sense siNA (1612C) | | |
| | | | | stab26 | | |
| 1616 | AGACUCGCGUUGCAAGGCGAGGC | 2663 | 37370 | VEGF:1634L21 anti- | CUCGccuuGcAAcGcGAGuTT | 4086 |
| | | | | sense siNA (1616C) | | |
| | | | | stab26 | | |
| 1622 | GCGUUGCAAGGCGAGGCAGCUUG | 2664 | 37371 | VEGF:1640L21 anti- | AGCuGccucGccuuGcAAcTT | 4087 |
| | | | | sense siNA (1622C) | | |
| | | | | stab26 | | |
| 1626 | UGCAAGGCGAGGCAGCUUGAGUU | 2665 | 37372 | VEGF:1644L21 anti- | CUCAAGcuGccucGccuuGTT | 4088 |
| | | | | sense siNA (1626C) | | |
| | | | | stab26 | | |
| 1628 | CAAGGCGAGGCAGCUUGAGUUAA | 2666 | 37373 | VEGF:1646L21 anti- | AACucAAGcuGccucGccuTT | 4089 |
| | | | | sense siNA (1628C) | | |
| | | | | stab26 | | |
| 1633 | CGAGGCAGCUUGAGUUAAACGAA | 2573 | 37374 | VEGF:1651L21 anti- | CGUuuAAcucAAGcuGccuTT | 4090 |
| | | | | sense siNA (1633C) | | |
| | | | | stab26 | | |
| 1634 | GAGGCAGCUUGAGUUAAACGAAC | 2574 | 37375 | VEGF:1652L21 anti- | UCGuuuAAcucAAGcuGccTT | 4091 |
| | | | | sense siNA (1634C) | | |
| | | | | stab26 | | |
| 1635 | AGGCAGCUUGAGUUAAACGAACG | 2575 | 37376 | VEGF:1653L21 anti- | UUCGuuuAAcucAAGcuGcTT | 4092 |
| | | | | sense siNA (1635C) | | |
| | | | | stab26 | | |
| 1636 | GGCAGCUUGAGUUAAACGAACGU | 2576 | 37377 | VEGF:1654L21 anti- | GUUcGuuuAAcucAAGcuGTT | 4093 |
| | | | | sense siNA (1636C) | | |
| | | | | stab26 | | |
| 1637 | GCAGCUUGAGUUAAACGAACGUA | 2559 | 37378 | VEGF:1655L21 anti- | CGUucGuuuAAcucAAGcuTT | 4094 |
| | | | | sense siNA (1637C) | | |
| | | | | stab26 | | |
| 1643 | UGAGUUAAACGAACGUACUUGCA | 2667 | 37379 | VEGF:1661L21 anti- | CAAGuAcGuucGuuuAAcuTT | 4095 |
| | | | | sense siNA (1643C) | | |
| | | | | stab26 | | |
| 1645 | AGUUAAACGAACGUACUUGCAGA | 2668 | 37380 | VEGF:1663L21 anti- | UGCAAGuAcGuucGuuuAATT | 4096 |
| | | | | sense siNA (1645C) | | |
| | | | | stab26 | | |
| 1646 | GUUAAACGAACGUACUUGCAGAU | 2669 | 37381 | VEGF:1664L21 anti- | CUGcAAGuAcGuucGuuuATT | 4097 |
| | | | | sense siNA (1646C) | | |
| | | | | stab26 | | |
| 1647 | UUAAACGAACGUACUUGCAGAUG | 2670 | 37382 | VEGF:1665L21 anti- | UCUGcAAGuAcGuucGuuuTT | 4098 |
| | | | | sense siNA (1647C) | | |
| | | | | stab26 | | |
| 1648 | UAAACGAACGUACUUGCAGAUGU | 2577 | 37383 | VEGF:1666L21 anti- | AUCuGcAAGuAcGuucGuuTT | 4099 |
| | | | | sense siNA (1648C) | | |
| | | | | stab26 | | |
| 1655 | ACGUACUUGCAGAUGUGACAAGC | 2671 | 37384 | VEGF:1673L21 anti- | UUGucAcAucuGcAAGuAcTT | 4100 |
| | | | | sense siNA (1655C) | | |
| | | | | stab26 | | |
| 1656 | CGUACUUGCAGAUGUGACAAGCC | 2560 | 37385 | VEGF:1674L21 anti- | CUUGucAcAucuGcAAGuATT | 4101 |
| | | | | sense siNA (1656C) | | |
| | | | | stab26 | | |
| 1657 | GUACUUGCAGAUGUGACAAGCCG | 2672 | 37386 | VEGF:1675L21 anti- | GCUuGucAcAucuGcAAGuTT | 4102 |
| | | | | sense siNA (1657C) | | |
| | | | | stab26 | | |
| 1562 | AAAGCAUUUGUUUGUACAAGAUC | 2581 | 37575 | VEGF:1562U21 sense | B AGcAuuuGuuuGuAcAAGATT B | 4103 |
| | | | | siNA stab07 | | |
| 1562 | AAAGCAUUUGUUUGUACAAGAUC | 2581 | 37577 | VEGF:1580L21 anti- | UCUuGuAcAAAcAAAuGcuTT | 4104 |
| | | | | sense siNA (1562C) | | |
| | | | | stab26 | | |
| 1215 | GUGGACAUCUUCCAGGAGUACCC | 2543 | 37789 | VEGF:1233L21 anti- | GUAcuccuGGAAGAuGuccTT | 4105 |
| | | | | sense siNA (1215C) | | |
| | | | | stab26 | | |

VEGF/VEGFR multifunctional siNA

| | | | |
|---|---|---|---|
| Target | Seq | Cmpd | Seq |

| | | | | | | |
|---|---|---|---|---|---|---|
| Pos | Target | ID | # | Aliases | Sequence | ID |

| | | | | | | |
|---|---|---|---|---|---|---|
| 1501 | ACCUCACUGCCACUCUAAUUGUC | 2673 | 34692 | F/K bf-1a siNA stab00 | CAAUUAGAGUGGCAGUGAGCAAAGTT | 4106 |
| | CCUCACUGCCACUCUAAUUGUCA | | | [FLT1:1519L21 (1501C) | | |
| | | | | -14 + KDR:503U21] | | |
| 1502 | CCUCACUGCCACUCUAAUUGUCA | 2674 | 34693 | F/K bf-2a siNA stab00 | ACAAUUAGAGUGGCAGUGAGCAAAGTT | 4107 |
| | CCUCACUGCCACUCUAAUUGUCA | | | [FLT1:1520L21 (1502C) | | |
| | | | | -13 + KDR:503U21] | | |
| 1503 | CUCACUGCCACUCUAAUUGUCAA | 2675 | 34694 | F/K bf-3a siNA stab00 | GACAAUUAGAGUGGCAGUGAGCAAAGTT | 4108 |
| | CCUCACUGCCACUCUAAUUGUCA | | | [FLT1:1521L21 (1503C) | | |
| | | | | -12 + KDR:503U21] | | |
| 3646 | AAAGCAUUUGUUUGUACAAGAUC | 2676 | 34695 | V/F bf-1a siNA stab00 | UGUGCCAGCAGUCCAGCAUUUGUUUGUACAAGATT | 4109 |
| | UCAUGCUGGACUGCUGGCACAGA | | | [FLT1:3664L19 (3646C) | | |
| | | | | -5 +VEGF:1562U21] | | |
| 5353 | AGAGAGACGGGGUCAGAGAGAGC | 2677 | 34696 | V/F bf-2a siNA stab00 | | |
| | AAGACCCCGUCUCUAUACCAACC | | | [FLT1:5371L19 (5353C) | UUGGUAUAGAGACGGGGUCAGAGAGATT | 4110 |
| | | | | -12 +VEGF:360U21] | | |
| 1501 | ACCUCACUGCCACUCUAAUUGUC | 2678 | 34697 | F/K bf-1b siNA stab00 | CUUUGCUCACUGCCACUCUAAUUGTT | 4111 |
| | UCAGAGUGGCAGUGAGCAAAGGG | | | [KDR:521L21 (503C) | | |
| | | | | -14 + FLT1:1501U21] | | |
| 1502 | CCUCACUGCCACUCUAAUUGUCA | 2679 | 34698 | F/K bf-2b siNA stab00 | CUUUGCUCACUGCCACUCUAAUUGUTT | 4112 |
| | UCAGAGUGGCAGUGAGCAAAGGG | | | [KDR:521L21 (503C) | | |
| | | | | -13 +FLT1:1502U21] | | |
| 1503 | CUCACUGCCACUCUAAUUGUCAA | 2680 | 34699 | F/K bf-3b siNA stab00 | CUUUGCUCACUGCCACUCUAAUUGUCTT | 4113 |
| | UCAGAGUGGCAGUGAGCAAAGGG | | | [KDR:521L21 (503C) | | |
| | | | | -12 +FLT1:1503U21] | | |
| 3646 | AAAGCAUUUGUUUGUACAAGAUC | 2676 | 34700 | V/F bf-1b siNA stab00 | UCUUGUACAAACAAAUGCUGGACUGCUGGCACATT | 4114 |
| | UCAUGCUGGACUGCUGGCACAGA | | | [VEGF:1580L19 (1562C) | | |
| | | | | -5 +FLT1:3646U21] | | |
| 5353 | AGAGAGACGGGGUCAGAGAGAGC | 2677 | 34701 | V/F bf-2b siNA stab00 | UCUCUCUGACCCCGUCUCUAUACCAATT | 4115 |
| | AAGACCCCGUCUCUAUACCAACC | | | [VEGF:378L21 (360C) | | |
| | | | | -12 +FLT1:5353U21] | | |
| 3646 | AAUGUGAAUGCAGACCAAAGAAA | 2681 | 34702 | V/F bf-3a siNA stab00 | UGUGCCAGCAGUCCAGCAU | 4116 |
| | UCAUGCUGGACUGCUGGCACAGA | | | [FLT1:3664L19 | UGUGAAUGCAGACCAAAGATT | |
| | | | | (3646C) + | | |
| | | | | VEGF1 420:U21] | | |
| 3646 | AAUGUGAAUGCAGACCAAAGAAA | 2681 | 34703 | V/F bf-3b siNA stab00 | UCUUUGGUCUGCAUUCACA | 4117 |
| | UCAUGCUGGACUGCUGGCACAGA | | | [VEGF1 438:L19 | AUGCUGGACUGCUGGCACATT | |
| | | | | (1420C) + | | |
| | | | | FLT1:3646U211 | | |
| 3648 | AAUGUGAAUGCAGACCAAAGAAA | 2681 | 34704 | V/F bf-4a siNA stab00 | UGUGCCAGCAGUCCAGC | 4118 |
| | UCAUGCUGGACUGCUGGCACAGA | | | [FLT1:3664L17 | UGAAUGCAGACCAAAGATT | |
| | | | | (3648C) + | | |
| | | | | VEGF1422:U19] | | |
| 3648 | AAUGUGAAUGCAGACCAAAGAAA | 2681 | 34705 | V/F bf-4b siNA stab00 | UCUUUGGUCUGCAUUCA | 4119 |
| | UCAUGCUGGACUGCUGGCACAGA | | | [VEGF1438:L17 | GCUGGACUGCUGGCACATT | |
| | | | | (1422C) + | | |
| | | | | FLT1:3648U19] | | |
| 3646 | AAUGUGAAUGCAGACCAAAGAAA | 2681 | 34706 | V/F bf-5a siNA stab00 | UGUGCCAGCAGUCCAGCAU | 4120 |
| | UCAUGCUGGACUGCUGGCACAGA | | | [FLT1:3664L19 | GAAUGCAGACCAAAGAAAGTT | |
| | | | | (3646C) + | | |
| | | | | VEGF1423:U19] | | |
| 3646 | AAUGUGAAUGCAGACCAAAGAAA | 2681 | 34707 | V/F bf-5b siNA stab00 | CUUUCUUUGGUCUGCAUUC | 4121 |
| | UCAUGCUGGACUGCUGGCACAGA | | | [VEGF1441:L19 | AUGCUGGACUGCUGGCACATT | |
| | | | | (1420C) + | | |
| | | | | FLT1:3646U21] | | |
| 3646 | AUGUGAAUGCAGACCAAAGAAAG | 2682 | 34708 | V/F bf-6a siNA stab00 | UGUGCCAGCAGUCCAGCAU | 4122 |
| | UCAUGCUGGACUGCUGGCACAGA | | | [FLT1:3664L19 | GUGAAUGCAGACCAAAGAATT | |
| | | | | (3646C) + | | |
| | | | | VEGF1421:U21] | | |
| 3646 | AUGUGAAUGCAGACCAAAGAAAG | 2682 | 34709 | V/F bf-6b siNA stab00 | UUCUUUGGUCUGCAUUCAC | 4123 |
| | UCAUGCUGGACUGCUGGCACAGA | | | [VEGF1 439:L19 | AUGCUGGACUGCUGGCACATT | |
| | | | | (1421C) + | | |
| | | | | FLT1:3646U21] | | |
| 1215 | GUGGACAUCUUCCAGGAGUACCC | 2683 | 36408 | V/F bf-L-03 siNA | GGACAUCUUCCAGGAGUACTT L | 4124 |
| | CUGAACUGAGUUUAAAAGGCACC | | | stab00 [VEGF:1215U21 | GAACUGAGUUUAAAAGGCATT | |
| | | | | o18S FLT1:348U21] | | |
| 1421 | AUGUGAAUGCAGACCAAAGAAAG | 2684 | 36409 | V/F bf-L-02 siNA | GUGAAUGCAGACCAAAGAATT L | 4125 |
| | CUGAACUGAGUUUAAAAGGCACC | | | stab00 [VEGF:1421U21 | GAACUGAGUUUAAAAGGCATT | |
| | | | | o18S FLT1:346U211 | | |
| 3854 | UUUGAGCAUGGAAGAGGAUUCUG | 2685 | 36411 | F/K bf-L-04 siNA | UGAGCAUGGAAGAGGAUUCTT L | 4126 |
| | CUGAACUGAGUUUAAAAGGCACC | | | stab00 [KDR:3854U21 | GAACUGAGUUUAAAAGGCATT | |
| | | | | o18S FLT1:346U211 | | |
| 346 | CUGAACUGAGUUUAAAAGGCACC | 2686 | 36416 | V/F bf-L-01 siNA | GAACUGAGUUUAAAAGGCATT L | |
| | AUGUGAAUGCAGACCAAAGAAAG | | | stab00 [FLT1:346U21 | GUGAAUGCAGACCAAAGAATT | 4127 |
| | | | | o18S VEGF:1421U211 | | |
| 3646 | UCAUGCUGGACUGCUGGCACAGA | 2687 | 36425 | V/F bf-L-05 siNA | AUGCUGGACUGCUGGCACATT L | |
| | AUGUGAAUGCAGACCAAAGAAAG | | | stab00 [FLT1:3646U21 | GUGAAUGCAGACCAAAGAATT | 4128 |
| | | | | o18S VEGF:1421U21] | | |
| 3646 | UCAUGCUGGACUGCUGGCACAGA | 2687 | 36426 | V/F bf-L-06 siNA | AUGCUGGACUGCUGGCACATT W | 4129 |
| | AUGUGAAUGCAGACCAAAGAAAG | | | stab00 [FLT1:3646U21 | GUGAAUGCAGACCAAAGAATT | |
| | | | | c12S VEGF:1421U21] | | |
| 3646 | UCAUGCUGGACUGCUGGCACAGA | 2687 | 36427 | V/F bf-L-07 siNA | AUGCUGGACUGCUGGCACATT Y | 4130 |
| | AUGUGAAUGCAGACCAAAGAAAG | | | stab00 [FLT1:3646U21 | GUGAAUGCAGACCAAAGAATT | |
| | | | | o9S VEGF:1421U21] | | |
| 3646 | UCAUGCUGGACUGCUGGCACAGA | 2687 | 36428 | V/F bf-L-08 siNA | AUGCUGGACUGCUGGCACATT Z | 4131 |
| | AUGUGAAUGCAGACCAAAGAAAG | | | stab00 [FLT1:3646U21 | GUGAAUGCAGACCAAAGAATT | |
| | | | | c3S VEGF:1421U21] | | |
| 3646 | UCAUGCUGGACUGCUGGCACAGA | 2687 | 36429 | V/F bf-L-09 siNA | AUGCUGGACUGCUGGCACATT LL | 4132 |
| | AUGUGAAUGCAGACCAAAGAAAG | | | stab00 [FLT1:3646U21 | GUGAAUGCAGACCAAAGAATT | |
| | | | | 2x o18S VEGF:1421U21] | | |
| 162 | UCCCUCUUCUUUUUUCUUAAACA | 2688 | 37537 | V/K bf-1a siNA | UUUAAGAAAAAAGAAGAGGAAGCUCCUGATT | 4133 |
| | AGAAGAAGAGGAAGCUCCUGAAG | | | stab00 [VEGF:180L21 | | |
| | | | | (162C) -9 + | | |
| | | | | KDR:3263U21] | | |
| 164 | CCUCUUCUUUUUUCUUAAACAUU | 2689 | 37538 | V/F bf-7a siNA | UGUUUAAGAAAAAAGAAGAAGGAAACAGAATT | 4134 |
| | UCAAAGAAGAAGGAAACAGAAUC | | | stab00 [VEGF:182L21 | | |
| | | | | (164C) -8 + | | |
| | | | | FLT1:594U21] | | |
| 202 | AUUGUUUCUCGUUUUAAUUUAUU | 2690 | 37539 | V/F bf-8a siNA | UAAAUUAAAACGAGAAACAUUCUUUUAUCTT | 4135 |
| | AGCGAGAAACAUUCUUUUAUCUG | | | stab00 [VEGF:220L21 | | |
| | | | | (202C) -9 + | | |
| | | | | FLT1:3323U21] | | |
| 237 | UCCCCACUUGAAUCGGGCCGACG | 2691 | 37540 | V/F bf-9a siNA stab00 | UCGGCCCGAUUCAAGUGGGCCUUGGAUCGTT | 4136 |
| | GAUCAAGUGGGCCUUGGAUCGCU | | | [VEGF:255L21 (237C) -9 | | |
| | | | | +FLT1:5707U21] | | |
| 238 | CCCCACUUGAAUCGGGCCGACGG | 2692 | 37541 | V/F bf-10a siNA | GUCGGCCCGAUUCAAGUGGCCAGAGGCAUTT | 4137 |
| | UUUUCAAGUGGCCAGAGGCAUGG | | | stab00 [VEGF:256L21 | | |
| | | | | (238C) -9 | | |
| | | | | + FLT1:3260U21] | | |
| 338 | CUCCAGAGAGAAGUCGAGGAAGA | 2693 | 37542 | V/K bf-2a siNA stab00 | UUCCUCGACUUCUCUCUGGUUGUGUAUGUTT | 4138 |
| | GGUCUCUCUGGUUGUGUAUGUCC | | | [VEGF:356L21 (338C) -9 | | |
| | | | | +KDR:1541U21] | | |
| 360 | AGAGAGACGGGGUCAGAGAGAGC | 2694 | 37543 | V/F bf-11a siNA | UCUCUCUGACCCCGUCUCUAUACCAACTT | 4139 |
| | AGACCCCGUCUCUAUACCAACCA | | | stab00 [VEGF:378L21 | | |
| | | | | (360C) -11 | | |
| | | | | + FLT1:5354U21] | | |
| 484 | GCAGCUGACCAGUCGCGCUGACG | 2695 | 37544 | V/F bf-12a siNA | UCAGCGCGACUGGUCAGCUACUGGGACACTT | 4140 |
| | CAUGGUCAGCUACUGGGACACCG | | | stab00 [VEGF:502L21 | | |
| | | | | (484C) -9 | | |
| | | | | + FLT1:251U21] | | |
| 654 | CUGAAACUUUUCGUCCAACUUCU | 2696 | 37545 | V/F bf-13a siNA | AAGUUGGACGAAAAGUUUCCACUUGACACTT | 4141 |
| | AAAAAAGUUUCCACUUGACACUU | | | stab00 [VEGF:672L21 | | |
| | | | | (654C) -9 | | |
| | | | | + FLT1:758U21] | | |
| 978 | CCCCACAGCCCGAGCCGGAGAGG | 2697 | 37546 | V/F bf-14a siNA | UCUCCGGCUCGGGCUGUGGGAAAUCUUCUCCTT | 4142 |
| | UUGCUGUGGGAAAUCUUCUCCUU | | | stab00 [VEGF:996L21 | | |
| | | | | (978C) -7 | | |
| | | | | + FLT1:3513U21] | | |
| 1038 | ACCAUGAACUUUCUGCUGUCUUG | 2698 | 37547 | V/F bf-15a siNA | AGACAGCAGAAAGUUCAUGAGCCUGGAAATT | 4143 |
| | UCAAGUUCAUGAGCCUGGAAAGA | | | stab00 [VEGF:1056L21 | | |
| | | | | (1038C) -9 | | |
| | | | | + FLT1:3901U21] | | |
| 1095 | CACCAUGCCAAGUGGUCCCAGGC | 2699 | 37548 | V/K bf-3a siNA stab00 | CUGGGACCACUUGGCAUGGAGUUCUUGGCAUTT | 4144 |
| | AGGGCAUGGAGUUCUUGGCAUCG | | | [VEGF:1113L21 (1095C) | | |
| | | | | -7 +KDR:3346U21] | | |
| 1253 | CAUCUUCAAGCCAUCCUGUGUGC | 2700 | 37549 | V/K bf-4a siNA stab00 | ACACAGGAUGGCUUGAAGAUGGGAAGGAUUUTT | 4145 |
| | UGUUGAAGAUGGGAAGGAUUUGC | | | [VEGF:1271L21 (1253C) | | |
| | | | | -7 + KDR:4769U21] | | |
| 1351 | UGCAGAUUAUGCGGAUCAAACCU | 2701 | 37550 | V/F bf-16a siNA stab00 | GUUUGAUCCGCAUAAUCUGGGACAGUATT | 4146 |
| | AACGCAUAAUCUGGGACAGUAGA | | | [VEGF:1369L21 (1351C) | | |
| | | | | -11 + FLT1:796U211 | | |
| 1352 | GCAGAUUAUGCGGAUCAAACCUC | 2702 | 37551 | V/F bf-17a siNA | GGUUUGAUCCGCAUAAUCUGGGACAGUATT | 4147 |
| | AACGCAUAAUCUGGGACAGUAGA | | | stab00 [VEGF:1370L21 | | |
| | | | | (1352C) -10 | | |
| | | | | + FLT1:796U21] | | |
| 1389 | AUAGGAGAGAUGAGCUUCCUACA | 2703 | 37552 | V/K bf-5a siNA stab00 | UAGGAAGCUCAUCUCUCCUGUGGAUUCCUTT | 4148 |
| | UAAUCUCUCCUGUGGAUUCCUAC | | | [VEGF:1407L21 (1389C) | | |
| | | | | -9 +KDR:1588U21] | | |
| 1401 | AGCUUCCUACAGCACAACAAAUG | 2704 | 37553 | V/F bf-18a siNA stab00 | UUUGUUGUGCUGUAGGAAGCUCUGAUGAUGUCTT | 4149 |
| | UCAGGAAGCUCUGAUGAUGUCAG | | | [VEGF:1419L21 (1401C) | | |
| | | | | -6 + FLT1:3864U21] | | |
| 1408 | UACAGCACAACAAAUGUGAAUGC | 2705 | 37554 | V/K bf-6a siNA stab00 | AUUCACAUUUGUUGUGCUGUUUCUGACUCTT | 4150 |
| | UCGUUGUGCUGUUUCUGACUCCU | | | [VEGF:1426L21 (1408C) | | |
| | | | | -9 + KDR:5038U21] | | |
| 1417 | ACAAAUGUGAAUGCAGACCAAAG | 2706 | 37555 | V/K bf-7a siNA stab00 | UUGGUCUGCAUUCACAUUUUGUAUCAGUTT | 4151 |
| | CUAUUCACAUUUUGUAUCAGUAU | | | [VEGF:1435L21 (1417C) | | |
| | | | | -10 +KDR:5737U211 | | |
| 162 | UCCCUCUUCUUUUUUCUUAAACA | 2688 | 37556 | V/K bf-1b siNA stab00 | UCAGGAGCUUCCUCUUCUUUUUUCUUAAATT | 4152 |
| | AGAAGAAGAGGAAGCUCCUGAAG | | | [KDR:3281L21 (3263C) | | |
| | | | | -9 +VEGF:162U21] | | |
| 164 | CCUCUUCUUUUUUCUUAAACAUU | 2689 | 37557 | V/F bf-7b siNA stab00 | UUCUGUUUCCUUCUUCUUUUUUCUUAAACATT | 4153 |
| | UCAAAGAAGAAGGAAACAGAAUC | | | [FLT1:612L21 (594C) | | |
| | | | | -8 +VEGF:164U21] | | |
| 202 | AUUGUUUCUCGUUUUAAUUUAUU | 2690 | 37558 | V/F bf-8b siNA stab00 | GAUAAAAGAAUGUUUCUCGUUUUAAUUUATT | 4154 |
| | AGCGAGAAACAUUCUUUUAUCUG | | | (FLT1:3341121 (3323C) | | |
| | | | | -9 +VEGF:202U21] | | |
| 237 | UCCCCACUUGAAUCGGGCCGACG | 2691 | 37559 | V/F bf-9b siNA stab00 | CGAUCCAAGGCCCACUUGAAUCGGGCCGATT | 4155 |
| | GAUCAAGUGGGCCUUGGAUCGCU | | | [FLT1:5725L21 (5707C) | | |
| | | | | -9 +VEGF:237U21] | | |
| 238 | CCCCACUUGAAUCGGGCCGACGG | 2692 | 37560 | V/F bf-10b siNA | AUGCCUCUGGCCACUUGAAUCGGGCCGACTT | 4156 |
| | UUUUCAAGUGGCCAGAGGCAUGG | | | stab00 [FLT1:3278L21 | | |
| | | | | (3260C) -9 + | | |
| | | | | VEGF:238U21] | | |
| 338 | CUCCAGAGAGAAGUCGAGGAAGA | 2693 | 37561 | V/K bf-2b siNA stab00 | ACAUACACAACCAGAGAGAAGUCGAGGAATT | 4157 |
| | GGUCUCUCUGGUUGUGUAUGUCC | | | [KDR:1559L21 (1541C) | | |
| | | | | -9 +VEGF:338U21] | | |
| 360 | AGAGAGACGGGGUCAGAGAGAGC | 2694 | 37562 | V/F bf-11b siNA | GUUGGUAUAGAGACGGGGUCAGAGAGATT | 4158 |
| | AGACCCCGUCUCUAUACCAACCA | | | stab00 [FLT1:5372L21 | | |
| | | | | (5354C) -11 | | |
| | | | | +VEGF:360U21] | | |
| 484 | GCAGCUGACCAGUCGCGCUGACG | 2695 | 37563 | V/F bf-12b siNA | GUGUCCCAGUAGCUGACCAGUCGCGCUGATT | 4159 |
| | CAUGGUCAGCUACUGGGACACCG | | | stab00 [FLT1:269L21 | | |
| | | | | (251C) -9 | | |
| | | | | +VEGF:484U21] | | |
| 654 | CUGAAACUUUUCGUCCAACUUCU | 2696 | 37564 | V/F bf-13b siNA | GUGUCAAGUGGAAACUUUUCGUCCAACUUTT | 4160 |
| | AAAAAAGUUUCCACUUGACACUU | | | stab00 [FLT1:776L21 | | |
| | | | | (758C) -9 + | | |
| | | | | VEGF:654U21] | | |
| 978 | CCCCACAGCCCGAGCCGGAGAGG | 2697 | 37565 | V/F bf-14b siNA | GGAGAAGAUUUCCCACAGCCCGAGCCGGAGATT | 4161 |
| | UUGCUGUGGGAAAUCUUCUCCUU | | | stab00 [FLT1:3531L21 | | |
| | | | | (3513C) -7 | | |
| | | | | +VEGF:978U21] | | |
| 1038 | ACCAUGAACUUUCUGCUGUCUUG | 2698 | 37566 | V/F bf-15b siNA | UUUCCAGGCUCAUGAACUUUCUGCUGUCUTT | 4162 |
| | UCAAGUUCAUGAGCCUGGAAAGA | | | stab00 [FLT1:3919L21 | | |
| | | | | (3901C) -9 | | |
| | | | | +VEGF:1038U21] | | |
| 1095 | CACCAUGCCAAGUGGUCCCAGGC | 2699 | 37567 | V/K bf-3b siNA | AUGCCAAGAACUCCAUGCCAAGUGGUCCCAGTT | 4163 |
| | AGGGCAUGGAGUUCUUGGCAUCG | | | stab00 [KDR:3364L21 | | |
| | | | | (3346C) -7 | | |
| | | | | +VEGF:1095U211 | | |
| 1253 | CAUCUUCAAGCCAUCCUGUGUGC | 2700 | 37568 | V/K bf-4b siNA | AAAUCCUUCCCAUCUUCAAGCCAUCCUGUGUTT | 4164 |
| | UGUUGAAGAUGGGAAGGAUUUGC | | | stab00 [KDR:4787L21 | | |
| | | | | (4769C) -7 | | |
| | | | | +VEGF:1253U21] | | |
| 1351 | UGCAGAUUAUGCGGAUCAAACCU | 2701 | 37569 | V/F bf-16b siNA | UACUGUCCCAGAUUAUGCGGAUCAAACTT | 4165 |
| | AACGCAUAAUCUGGGACAGUAGA | | | stab00 [FLT1:814L21 | | |
| | | | | (796C) -11 | | |
| | | | | +VEGF:1351U21] | | |
| 1352 | GCAGAUUAUGCGGAUCAAACCUC | 2702 | 37570 | V/F bf-17b siNA | UACUGUCCCAGAUUAUGCGGAUCAAACCTT | 4166 |
| | AACGCAUAAUCUGGGACAGUAGA | | | stab00 [FLT1:814L21 | | |
| | | | | (796C) -10 | | |
| | | | | +VEGF:1352U21] | | |
| 1389 | AUAGGAGAGAUGAGCUUCCUACA | 2703 | 37571 | V/K bf-5b siNA | AGGAAUCCACAGGAGAGAUGAGCUUCCUATT | 4167 |
| | UAAUCUCUCCUGUGGAUUCCUAC | | | stab00 [KDR:1606L21 | | |
| | | | | (1588C) -9 | | |
| | | | | +VEGF:1389U21] | | |
| 1401 | AGCUUCCUACAGCACAACAAAUG | 2704 | 37572 | V/F bf-18b siNA | GACAUCAUCAGAGCUUCCUACAGCACAACAAAU | 4168 |
| | UCAGGAAGCUCUGAUGAUGUCAG | | | stab00 [FLT1:3882L21 | | |
| | | | | (3864C) -6 | | |
| | | | | +VEGF:1401U21] | | |
| 1408 | UACAGCACAACAAAUGUGAAUGC | 2705 | 37573 | V/K bf-6b siNA | GAGUCAGAAACAGCACAACAAAUGUGAAUTT | 4169 |
| | UCGUUGUGCUGUUUCUGACUCCU | | | stab00 [KDR:5056L21 | | |
| | | | | (5038C) -9 | | |
| | | | | +VEGF:1408U21] | | |
| 1417 | ACAAAUGUGAAUGCAGACCAAAG | 2706 | 37574 | V/K bf-7b siNA | ACUGAUACAAAAUGUGAAUGCAGACCAATT | 4170 |
| | CUAUUCACAUUUUGUAUCAGUAU | | | stab00 [KDR:5755L21 | | |
| | | | | (5737C) -10 | | |
| | | | | +VEGF:1417U21] | | |
| 3646 | AAAGCAUUUGUUUGUACAAGAUC | 2676 | 37578 | V/F bf-1a siNA | UGUGccAGcAGuccAGcAu | 4171 |
| | UCAUGCUGGACUGCUGGCACAGA | | | stab07/26 | AGcAuuuGuuuGuAcAAGATT B | |
| | | | | [FLT1:3664L19 | | |
| | | | | (3646C) -5 | | |
| | | | | +VEGF:1562U21] | | |
| 3646 | AAAGCAUUUGUUUGUACAAGAUC | 2676 | 37579 | V/F bf-1b siNA | UCUuGuAcAAAcAAAuGcu | 4172 |
| | UCAUGCUGGACUGCUGGCACAGA | | | stab07/26 | AuGcuGGAcuGcuGGcAcATT B | |
| | | | | [VEGF:1580L19 | | |
| | | | | (1562C) -5 | | |
| | | | | + FLT1:3646U211 | | |
| 1215 | GUGGACAUCUUCCAGGAGUACCC | 2683 | 37777 | V/F bf-L-03 siNA | B GGAcAucuuccAGGAGuAcTT L | 4173 |
| | CUGAACUGAGUUUAAAAGGCACC | | | stab07 [VEGF:1215U21 | GAAcuGAGuuuAAAAGGcATT B | |
| | | | | o18S FLT1:346U211 | | |
| 1421 | AUGUGAAUGCAGACCAAAGAAAG | 2684 | 37778 | V/F bf-L-02 siNA | B GuGAAuGcAGAccAAAGAATT L | 4174 |
| | CUGAACUGAGUUUAAAAGGCACC | | | stab07 [VEGF:1421U21 | GAAcuGAGuuuAAAAGGcATT B | |
| | | | | o18S FLT1:346U21] | | |
| 1421 | CUGAACUGAGUUUAAAAGGCACC | 2686 | 37779 | V/F bf-L-01 siNA | B GAAcuGAGuuuAAAAGGcATT L | 4175 |
| | AUGUGAAUGCAGACCAAAGAAAG | | | stab07 [FLT1:346U21 | GuGAAuGcAGAccAAAGAATT B | |
| | | | | o18S VEGF:1421U21] | | |
| 1421 | UCAUGCUGGACUGCUGGCACAGA | 2687 | 37780 | V/F bf-L-05 siNA | B AuGcuGGAcuGcuGGcAcATT L | 4176 |
| | AUGUGAAUGCAGACCAAAGAAAG | | | stab07 [FLT1:3646U21 | GuGAAuGcAGAccAAAGAATT B | |
| | | | | o18S VEGF:1421U21] | | |
| 1421 | UCAUGCUGGACUGCUGGCACAGA | 2687 | 37783 | V/F bf-L-05 siNA | cAUGCUGGACUGCUGGCACATU GAUCATCGTA | 4177 |
| | AUGUGAAUGCAGACCAAAGAAAG | | | stab00 [FLT1:3646U21 | GUGAAUGCAGACCAAAGAATT | |
| | | | | 10nt VEGF:1421U21] | | |
| 1421 | UCAUGCUGGACUGCUGGCACAGA | 2687 | 37784 | V/F bf-L-05 siNA | AUGCUGGACUGCUGGCACATT GAUCAT | 4178 |
| | AUGUGAAUGCAGACCAAAGAAAG | | | stab00 [FLT1:3646U21 | GUGAAUGCAGACCAAAGAATT | |
| | | | | 6nt VEGF:1421U21] | | |
| 1421 | UCAUGCUGGACUGCUGGCACAGA | 2687 | 37785 | V/F bf-L-05 siNA | AUGCUGGACUGCUGGCACATT GAU | 4179 |
| | AUGUGAAUGCAGACCAAAGAAAG | | | stab00 [FLT1:3646U21 | GUGAAUGCAGACCAAAGAATT | |
| | | | | 3nt VEGF:1421U211 | | |
| 1421 | UCAUGCUGGACUGCUGGCACAGA | 2687 | 37786 | V/F bf-L-05 siNA | AUGCUGGACUGCUGGCACATT | 4180 |
| | AUGUGAAUGCAGACCAAAGAAAG | | | stab00 [FLT1:3646U21 | GUGAAUGCAGACCAAAGAATT | |
| | | | | no linker | | |
| | | | | VEGF:1421U21] | | |
| 1421 | AUGUGAAUGCAGACCAAAGAAAG | 2682 | 37787 | V/F bf-6a siNA | UGUGccAGcAGuccAGcAuTT | 4181 |
| | UCAUGCUGGACUGCUGGCACAGA | | | stab07/26 [FLT1:3664L19 | GuGAAuGcAGAccAAAGAATT B | |
| | | | | (3646C) + | | |
| | | | | VEGF1 421:U21] | | |
| 1421 | AUGUGAAUGCAGACCAAAGAAAG | 2682 | 37788 | V/F bf-6b siNA | UUCuuuGGucuGcAuucAcTT | 4182 |
| | UCAUGCUGGACUGCUGGCACAGA | | | stab07/26 [ | AuGcuGGAcuGcuGGcAcATT B | |
| | | | | VEGF1439:L19 | | |
| | | | | (1421C) + | | |
| | | | | FLT1:3646U21] | | |
| 346 | CUGAACUGAGUUUAAAAGGCACC | 2686 | 38287 | V/F bf-L-10a siNA | B GAACUGAGUUUAAAAGGCAU L | 4183 |
| | AUGUGAAUGCAGACCAAAGAAAG | | | stab09 [FLT1:346U21 | GUGAAUGCAGACCAAAGAATT B | |
| | | | | o18S VEGF:1421U21] | | |
| 346 | CUGAACUGAGUUUAAAAGGCACC | 2686 | 38288 | V/F bf-L-11a siNA | B GAACUGAGUUUAAAAGGCA | 4184 |
| | AUGUGAAUGCAGACCAAAGAAAG | | | stab09 [FLT1:346U21 + | GUGAAUGCAGACCAAAGAA B | |
| | | | | VEGF:1421U21] | | |
| 346 | CUGAACUGAGUUUAAAAGGCACC | 2686 | 38289 | V/F bf-L-11b siNA | UUCUUUGGUCUGCAUUCAC | 4185 |
| | AUGUGAAUGCAGACCAAAGAAAG | | | stab00 [VEGF:1439L21 | UGCCUUUUAAACUCAGUUC | |
| | | | | (1421C) + | | |
| | | | | FLT1:364L21 (346C)] | | |
| 346 | CUGAACUGAGUUUAAAAGGCACC | 2686 | 38369 | V/F bf-L-26a siNA | UGCCUUUUAAACUCAGUUC | 4186 |
| | AUGUGAAUGCAGACCAAAGAAAG | | | stab22 [FLT1:364L21 | GUGAAUGCAGACCAAAGAATT B | |
| | | | | siNA (346C) + | | |
| | | | | VEGF:1421U21] | | |
| 346 | CUGAACUGAGUUUAAAAGGCACC | 2686 | 38370 | V/F bf-L-26b siNA | UUCUUUGGUCUGCAUUCAC | 4187 |
| | AUGUGAAUGCAGACCAAAGAAAG | | | stab22 [VEGF:1439L21 | GAACUGAGUUUAAAAGGCATT B | |
| | | | | siNA (1421C) + | | |
| | | | | FLT1:346U21 | | |
| | | | | siNA] | | |

VEGF/VEGFR DFO siNA

| | | | |
|---|---|---|---|
| Target | Seq | Cmpd | Seq |

| | | | | | | |
|---|---|---|---|---|---|---|
| Pos | Target | ID | # | Aliases | Sequence | ID |

| | | | | | | |
|---|---|---|---|---|---|---|
| 349 | AACUGAGUUUAAAAGGCACCCAG | 2289 | 32718 | FLT1:367L21 siRNA | pGGGUGCCUUUUAAACUC GAGUUUAAAAG B | 2810 |
| | | | | (349C) v1 5′p | | |
| | | | | palindrome | | |
| 349 | AACUGAGUUUAAAAGGCACCCAG | 2289 | 32719 | FLT1:367L21 siRNA | pGGGUGCCUUUUAAACUCAG GAGUUUAAAAG B | 2811 |
| | | | | (349C) v2 5′p | | |
| | | | | palindrome | | |
| 2949 | AAGCAAGGAGGGCCUCUGAUGGU | 2290 | 32720 | FLT1:2967L21 siRNA | pCAUCAGAGGCCCUCCUUGCAAGGAGGGCC | 2812 |
| | | | | (2949C) v1 5′p | UCU B | |
| | | | | palindrome | | |
| 2949 | AAGCAAGGAGGGCCUCUGAUGGU | 2290 | 32721 | FLT1:2967L21 siRNA | pCAUCAGAGGCCCUCCUUAAGGAGGGCCU | 2813 |
| | | | | (2949C) v2 5′p | CUG B | |
| | | | | palindrome | | |
| 2949 | AAGCAAGGAGGGCCUCUGAUGGU | 2290 | 32722 | FLT1:2967L21 siRNA | pCAUCAGAGGCCCUCCU AGGAGGGCCUCUG B | 2814 |
| | | | | (2949C) v3 5′p | | |
| | | | | palindrome | | |
| 354 | AGUUUAAAAGGCACCCAGCACAUC | 2707 | 32805 | FLT1:372L21 siRNA | pGUGCUGGGUGCCUUUUAAA AGGCACCCAGC B | 4188 |
| | | | | (354C) v1 5′p | | |
| | | | | palindrome | | |
| 354 | AGUUUAAAAGGCACCCAGCACAUC | 2707 | 32806 | FLT1:372L21 siRNA | pGUGCUGGGUGCCUUUAAA GGCACCCAGC B | 4189 |
| | | | | (354C) v2 5′p | | |
| | | | | palindrome | | |
| 354 | AGUUUAAAAGGCACCCAGCACAUC | 2707 | 32807 | FLT1:372L21 siRNA | pGUGCUGGGUGCCUUAAGGCACCCAGC B | 4190 |
| | | | | (354C) v3 5′p | | |
| | | | | palindrome | | |
| 1229 | GCAUAUAUAUGAUAAAGCAUUCA | 2708 | 32808 | FLT1:1247L21 siRNA | pAAUGCUUUAUCAUAUAUAU GAUAAAGC B | 4191 |
| | | | | (1229C) v1 5′p | | |
| | | | | palindrome | | |
| 1229 | GCAUAUAUAUGAUAAAGCAUUCA | 2708 | 32809 | FLT1:1247L21 siRNA | pAAUGCUUUAUCAUAUAU GAUAAAGC B | 4192 |
| | | | | (1229C) v2 5′p | | |
| | | | | palindrome | | |
| 1229 | GCAUAUAUAUGAUAAAGCAUUCA | 2708 | 32810 | FLT1:1247L21 siRNA | pAAUGCUUUAUCAUAU GAUAAAGC B | 4193 |
| | | | | (1229C) v3 5p | | |
| | | | | palindrome | | |
| 1229 | GCAUAUAUAUGAUAAAGCAUUCA | 2708 | 32811 | FLT1:1247L21 siRNA | pAAUGCUUUAUCAUAU GAUAAAGCA B | 4194 |
| | | | | (1229C) v4 5′p | | |
| | | | | palindrome | | |
| 1229 | GCAUAUAUAUGAUAAAGCAUUCA | 2708 | 32812 | FLT1:1247L21 siRNA | pAAUGCUUUAUCAUAUAU GAUAAAGCAUU B | 4195 |
| | | | | (1229C) v5 5′ | | |
| | | | | palindrome | | |
| 1229 | GCAUAUAUAUGAUAAAGCAUUCA | 2708 | 32813 | FLT1:1247L21 siRNA | pAAUGCUUUAUCAUAU GAUAAAGCAUU B | 4196 |
| | | | | (1229C) v6 5′ | | |
| | | | | palindrome | | |
| 349 | AACUGAGUUUAAAAGGCACCCAG | 2289 | 33056 | FLT1:367L21 siRNA | pGGGUGCCUUUUAAACUCAGGAGUUUAAA | 4197 |
| | | | | (349C) v3 5′ | AGG B | |
| | | | | palindrome | | |
| 349 | AACUGAGUUUAAAAGGCACCCAG | 2289 | 33057 | FLT1:367L21 siRNA | pGGGUGCCUUUUAAACUCGAGUUUAAAAG | 4198 |
| | | | | (349C) v4 5′ | GCA B | |
| | | | | palindrome | | |
| 349 | AACUGAGUUUAAAAGGCACCCAG | 2289 | 33058 | FLT1:367L21 siRNA | pGGGUGCCUUUUAAACU AGUUUAAAAGG B | 4199 |
| | | | | (349C) v5 5′ | | |
| | | | | palindrome | | |
| 349 | AACUGAGUUUAAAAGGCACCCAG | 2289 | 33059 | FLT1:367L21 siRNA | pGGGUGCCUUUUAAACU AGUUUAAAAGGC B | 4200 |
| | | | | (349C) v6 5′ | | |
| | | | | palindrome | | |
| 349 | AACUGAGUUUAAAAGGCACCCAG | 2289 | 33060 | FLT1:367L21 siRNA | pGGGUGCCUUUUAAACU AGUUUAAAAGGCA B | 4201 |
| | | | | (349C) v7 5′ | | |
| | | | | palindrome | | |
| 349 | AACUGAGUUUAAAAGGCACCCAG | 2289 | 33061 | FLT1:367L21 siRNA | pGGGUGCCUUUUAAACU AGUUUAAAAGGCAC B | 4202 |
| | | | | (349C) v8 5′ | | |
| | | | | palindrome | | |
| 349 | AACUGAGUUUAAAAGGCACCCAG | 2289 | 33062 | FLT1:367L21 siRNA | pGGGUGCCUUUUAAAC GUUUAAAAGGC B | 4203 |
| | | | | (349C) v9 5′ | | |
| | | | | palindrome | | |
| 349 | AACUGAGUUUAAAAGGCACCCAG | 2289 | 33063 | FLT1:367L21 siRNA | pGGGUGCCUUUUAAAC GUUUAAAAGGCA B | 4204 |
| | | | | (349C) v10 5′ | | |
| | | | | palindrome | | |
| 349 | AACUGAGUUUAAAAGGCACCCAG | 2289 | 33064 | FLT1:367L21 siRNA | pGGGUGCCUUUUAAAC GUUUAAAAGGCAC B | 4205 |
| | | | | (349C) v11 5′ | | |
| | | | | palindrome | | |
| 354 | AGUUUAAAAGGCACCCAGCACAU | 2316 | 34092 | FLT1:371L18 siRNA | pUGCUGGGUGCCUUUUAAAAGGCACCCAGC B | 4206 |
| | | | | (354C) v4 5′p | | |
| | | | | palindrome | | |
| 354 | AGUUUAAAAGGCACCCAGCACAU | 2316 | 34093 | FLT1:370L17 siRNA | pGCUGGGUGCCUUUUAAA AGGCACCCAGC B | 4207 |
| | | | | (354C) v5 5′ | | |
| | | | | palindrome | | |
| 354 | AGUUUAAAAGGCACCCAGCACAU | 2316 | 34094 | FLT1:370L17 siRNA | pGCUGGGUGCCUUUUAAA AGGCACCCAGCT B | 4208 |
| | | | | (354C) v6 5′ | | |
| | | | | palindrome | | |
| 354 | AGUUUAAAAGGCACCCAGCACAU | 2316 | 34095 | FLT1:370L17 siRNA | pGCUGGGUGCCUUUUAAA AGGCACCCAG B | 4209 |
| | | | | (354C) v7 5′ | | |
| | | | | palindrome | | |
| 354 | AGUUUAAAAGGCACCCAGCACAU | 2316 | 34096 | FLT1:369L16 siRNA | pCUGGGUGCCUUUUAAA AGGCACCCAG B | 4210 |
| | | | | (354C) v8 5′ | | |
| | | | | palindrome | | |
| 354 | AGUUUAAAAGGCACCCAGCACAU | 2316 | 34097 | FLT1:369L16 siRNA | pCUGGGUGCCUUUUAAA AGGCACCCA B | 4211 |
| | | | | (354C) v9 5′ | | |
| | | | | palindrome | | |
| 354 | AGUUUAAAAGGCACCCAGCACAU | 2316 | 34098 | FLT1:368L15 siRNA | pUGGGUGCCUUUUAAAAGGCACCCA B | 4212 |
| | | | | (354C) v10 5′p | | |
| | | | | palindrome | | |
| 354 | AGUUUAAAAGGCACCCAGCACAU | 2316 | 34099 | FLT1:368L15 siRNA | pUGGGUGCCUUUUAAAAGGCACCCAT B | 4213 |
| | | | | (354C) v11 5′p | | |
| | | | | palindrome | | |
| 354 | AGUUUAAAAGGCACCCAGCACAU | 2316 | 34100 | FLT1:368L15 siRNA | pUGGGUGCCUUUUAAAAGGCACCCATT B | 4214 |
| | | | | (354C) v12 5′ | | |
| | | | | palindrome | | |
| 1229 | GCAUAUAUAUGAUAAAGCAUUCA | 2708 | 34101 | FLT1:1247L21 siRNA | pUGCUUUAUCAUAUAUAU GAUAAAGCA B | 4215 |
| | | | | (1229C) v14 5′p | | |
| | | | | palindrome | | |
| 1229 | GCAUAUAUAUGAUAAAGCAUUCA | 2708 | 34102 | FLT1:1247L21 siRNA | pUGCUUUAUCAUAUAUAU GAUAAAGC B | 4216 |
| | | | | (1229C) v15 5′p | | |
| | | | | palindrome | | |
| 1229 | GCAUAUAUAUGAUAAAGCAUUCA | 2708 | 34103 | FLT1:1247L21 siRNA | pGCUUUAUCAUAUAUAU GAUAAAGC B | 4217 |
| | | | | (1229C) v16 5′p | | |
| | | | | palindrome | | |
| 1229 | GCAUAUAUAUGAUAAAGCAUUCA | 2708 | 34104 | FLT1:1247L17 siRNA | AAUGCUUUAUCAUAUAU GAUAAAGCAUU B | 4218 |
| | | | | (1229C) v5 | | |
| | | | | palindrome | | |
| 1229 | GCAUAUAUAUGAUAAAGCAUUCA | 2708 | 34105 | FLT1:1247L17 siRNA | pAAUGCUUUAUCAUAUAU GAUAAAGCAUUT B | 4219 |
| | | | | (1229C) v7 5′ | | |
| | | | | palindrome | | |
| 1229 | GCAUAUAUAUGAUAAAGCAUUCA | 2708 | 34106 | FLT1:1247L17 siRNA | pAAUGCUUUAUCAUAUAU GAUAAAGCAUUTT B | 4220 |
| | | | | (1229C) v8 5′p | | |
| | | | | palindrome | | |
| 1229 | GCAUAUAUAUGAUAAAGCAUUCA | 2708 | 34107 | FLT1:1247L17 siRNA | pAAUGCUUUAUCAUAUAU GAUAAAGCAU B | 4221 |
| | | | | (1229C) v9 5′ | | |
| | | | | palindrome | | |
| 1229 | GCAUAUAUAUGAUAAAGCAUUCA | 2708 | 34108 | FLT1:1247L16 siRNA | pAUGCUUUAUCAUAUAU GAUAAAGCAU B | 4222 |
| | | | | (1229C) v10 5′p | | |
| | | | | palindrome | | |
| 1229 | GCAUAUAUAUGAUAAAGCAUUCA | 2708 | 34109 | FLT1:1247L16 siRNA | pAUGCUUUAUCAUAUAU GAUAAAGCAUT B | 4223 |
| | | | | (1229C) v11 5′p | | |
| | | | | palindrome | | |
| 1229 | GCAUAUAUAUGAUAAAGCAUUCA | 2708 | 34110 | FLT1:1247L16 siRNA | pAUGCUUUAUCAUAUAU GAUAAAGCAUTT B | 4224 |
| | | | | (1229C) v12 5′p | | |
| | | | | palindrome | | |
| 1229 | GCAUAUAUAUGAUAAAGCAUUCA | 2708 | 34111 | FLT1:1247L16 siRNA | pAUGCUUUAUCAUAUAU GAUAAAGCA B | 4225 |
| | | | | (1229C) v13 5′p | | |
| | | | | palindrome | | |
| 1229 | GCAUAUAUAUGAUAAAGCAUUCA | 2708 | 34112 | FLT1:1247L17 siRNA | pAAUGCUUUAUCAUAUAU CUAUAAGCAUU B | 4226 |
| | | | | (1229C) v14 5′p | | |
| | | | | palindrome | | |
| 1229 | GCAUAUAUAUGAUAAAGCAUUCA | 2708 | 34113 | FLT1:1247L17 siRNA | pAAUGCUUUUAGUUAUAU GAUAAAGCAUU B | 4227 |
| | | | | (1229C) v15 5′p | | |
| | | | | palindrome | | |
| 1229 | GCAUAUAUAUGAUAAAGCAUUCA | 2708 | 34114 | FLT1:1247L17 siRNA | pAAUCCUUAAUCUUAUUU GAUAAAGCAUU B | 4228 |
| | | | | (1229C) v16 5′p | | |
| | | | | palindrome | | |
| 1229 | GCAUAUAUAUGAUAAAGCAUUCA | 2708 | 34115 | FLT1:1247L17 siRNA | pAAuGcuuuAucAuAuAu GAuAAAGcAuu B | 4229 |
| | | | | (1229C) v17 5′p | | |
| | | | | palindrome | | |
| 1229 | GCAUAUAUAUGAUAAAGCAUUCA | 2708 | 34116 | FLT1:1247L17 siRNA | pAAuGcuuuAucAuAuAu GAuAAAGcAuu B | 4230 |
| | | | | (1229C) v18 5′p | | |
| | | | | palindrome | | |

Uppercase = ribonucleotide
u,c = 2′-deoxy-2′-fluoro U,C
T = thymidine
B = inverted deoxy abasic
s = phosphorothioate linkage
A = deoxy Adenosine
G = deoxy Guanosine
G = 2′-O-methyl Guanosine
A = 2′-O-methyl Adenosine
X 3′-deoxy T
X = nitroindole
Z = nitropyrrole
T = thymidine
t = L-thymidine
u = L uridine
D = inverted thymidine
L = 5′ amino mod-C5 TFA (from W.W.)
L = hegS = hexethelyne glycol spacer; spacer-18 (Glen Research 10-1918-xx)
W = C12 spacer; spacer C12 (Glen Research 10-1928-xx)
Y = tetraethelyne glycol spacer; spacer 9 (Glen Research 10-1909-xx)
Z = C3 spacer; spacer C3 (Glen Research 10-1913-xx)
p = terminal phosphate
I = rI = ribo inosine (Glen Res #10-3044-xx)
U = 3′-O-Methyl Uridine
Gyl = glyceryl

[0626] TABLE IV
Non-limiting examples of Stabilization Chemistries for chemically
modified siNA constructs

| Chemistry | pyrimidine | Purine | cap | p = S | Strand |
|---|---|---|---|---|---|
| “Stab 00” | Ribo | Ribo | TT at 3′- | | S/AS |
| | | | ends | | |
| “Stab 1” | Ribo | Ribo | — | 5 at 5′-end | S/AS |
| | | | | 1 at 3′-end | |
| “Stab 2” | Ribo | Ribo | — | All | Usually AS |
| | | | | linkages | |
| “Stab 3” | 2′-fluoro | Ribo | — | 4 at 5′-end | Usually S |
| | | | | 4 at 3′-end | |
| “Stab 4” | 2′-fluoro | Ribo | 5′ and 3′- | — | Usually S |
| | | | ends | | |
| “Stab 5” | 2′-fluoro | Ribo | — | 1 at 3′-end | Usually AS |
| “Stab 6” | 2′-O- | Ribo | 5′ and 3′- | — | Usually S |
| | Methyl | | ends | | |
| “Stab 7” | 2′-fluoro | 2′-deoxy | 5′ and 3′- | — | Usually S |
| | | | ends | | |
| “Stab 8” | 2′-fluoro | 2′-O- | — | 1 at 3′-end | S/AS |
| | | Methyl | | | |
| “Stab 9” | Ribo | Ribo | 5′ and 3′- | — | Usually S |
| | | | ends | | |
| “Stab 10” | Ribo | Ribo | — | 1 at 3′-end | Usually AS |
| “Stab 11” | 2′-fluoro | 2′-deoxy | — | 1 at 3′-end | Usually AS |
| “Stab 12” | 2′-fluoro | LNA | 5′ and 3′- | | Usually S |
| | | | ends | | |
| “Stab 13” | 2′-fluoro | LNA | | 1 at 3′-end | Usually AS |
| “Stab 14” | 2′-fluoro | 2′-deoxy | | 2 at 5′-end | Usually AS |
| | | | | 1 at 3′-end | |
| “Stab 15” | 2′-deoxy | 2′-deoxy | | 2 at 5′-end | Usually AS |
| | | | | 1 at 3′-end | |
| “Stab 16” | Ribo | 2′-O- | 5′ and 3′- | | Usually S |
| | | Methyl | ends | | |
| “Stab 17” | 2′-O- | 2′-O- | 5′ and 3′- | | Usually S |
| | Methyl | Methyl | ends | | |
| “Stab 18” | 2′-fluoro | 2′-O- | 5′ and 3′- | | Usually S |
| | | Methyl | ends | | |
| “Stab 19” | 2′-fluoro | 2′-O- | 3′-end | | S/AS |
| | | Methyl | | | |
| “Stab 20” | 2′-fluoro | 2′-deoxy | 3′-end | | Usually AS |
| “Stab 21” | 2′-fluoro | Ribo | 3′-end | | Usually AS |
| “Stab 22” | Ribo | Ribo | 3′-end | | Usually AS |
| “Stab 23” | 2′-fluoro* | 2′-deoxy* | 5′ and 3′- | | Usually S |
| | | | ends | | |
| “Stab 24” | 2′-fluoro* | 2′-O- | — | 1 at 3′-end | S/AS |
| | | Methyl* | | | |
| “Stab 25” | 2′-fluoro* | 2′-O- | — | 1 at 3′-end | S/AS |
| | | Methyl* | | | |
| “Stab 26” | 2′-fluoro* | 2′-O- | — | | S/AS |
| | | Methyl* | | | |
| “Stab 27” | 2′-fluoro* | 2′-O- | 3′-end | | S/AS |
| | | Methyl* | | | |
| “Stab 28” | 2′-fluoro* | 2′-O- | 3′-end | | S/AS |
| | | Methyl* | | | |
| “Stab 29” | 2′-fluoro* | 2′-O- | | 1 at 3′-end | S/AS |
| | | Methyl* | | | |
| “Stab 30” | 2′-fluoro* | 2′-O- | | | S/AS |
| | | Methyl* | | | |
| “Stab 31” | 2′-fluoro* | 2′-O- | 3′-end | | S/AS |
| | | Methyl* | | | |
| “Stab 32” | 2′-fluoro | 2′-O- | | | S/AS |
| | | Methyl | | | |
| “Stab 33” | 2′-fluoro | 2′-deoxy* | 5′ and 3′- | — | Usually S |
| | | | ends | | |
| “Stab 34” | 2′-fluoro | 2′-O- | 5′ and 3′- | | Usually S |
| | | Methyl* | ends | | |

CAP = any terminal cap, see for example FIG. 10.
All Stab 00-33 chemistries can comprise 3′-terminal thymidine (TT) residues
All Stab 00-33 chemistries typically comprise about 21 nucleotides, but can vary as described herein.
S = sense strand
AS = antisense strand
*Stab 23 has a single ribonucleotide adjacent to 3′-CAP
*Stab 24 and Stab 28 have a single ribonucleotide at 5′-terminus
*Stab 25, Stab 26, and Stab 27 have three ribonucleotides at 5′-terminus
*Stab 29, Stab 30, Stab 31, Stab 33, and Stab 34 any purine at first three nucleotide positions from 5′-terminus are ribonucleotides
p = phosphorothioate linkage

[0627] TABLE V

| | | | | | |
|---|---|---|---|---|---|
| Reagent | Equivalents | Amount | Wait Time* DNA | Wait Time* 2′-O-methyl | Wait Time*RNA |

A. 2.5 μmol Synthesis Cycle ABI 394 Instrument

| | | | | | | | | | |
|---|---|---|---|---|---|---|---|---|---|
| Phosphoramidites | 6.5 | 163 | μL | 45 | sec | 2.5 | min | 7.5 | min |
| S-Ethyl Tetrazole | 23.8 | 238 | μL | 45 | sec | 2.5 | min | 7.5 | min |
| Acetic Anhydride | 100 | 233 | μL | 5 | sec | 5 | sec | 5 | sec |
| N-Methyl | 186 | 233 | μL | 5 | sec | 5 | sec | 5 | sec |
| Imidazole | | | | | | | | | |
| TCA | 176 | 2.3 | mL | 21 | sec | 21 | sec | 21 | sec |
| Iodine | 11.2 | 1.7 | mL | 45 | sec | 45 | sec | 45 | sec |
| Beaucage | 12.9 | 645 | μL | 100 | sec | 300 | sec | 300 | sec |

| | | | | | | |
|---|---|---|---|---|---|---|
| Acetonitrile | NA | 6.67 | mL | NA | NA | NA |

B. 0.2 μmol Synthesis Cycle ABI 394 Instrument

| | | | | | | | | | |
|---|---|---|---|---|---|---|---|---|---|
| Phosphoramidites | 15 | 31 | μL | 45 | sec | 233 | sec | 465 | sec |
| S-Ethyl Tetrazole | 38.7 | 31 | μL | 45 | sec | 233 | min | 465 | sec |
| Acetic Anhydride | 655 | 124 | μL | 5 | sec | 5 | sec | 5 | sec |
| N-Methyl | 1245 | 124 | μL | 5 | sec | 5 | sec | 5 | sec |
| Imidazole | | | | | | | | | |
| TCA | 700 | 732 | μL | 10 | sec | 10 | sec | 10 | sec |
| Iodine | 20.6 | 244 | μL | 15 | sec | 15 | sec | 15 | sec |
| Beaucage | 7.7 | 232 | μL | 100 | sec | 300 | sec | 300 | sec |

| | | | | | | |
|---|---|---|---|---|---|---|
| Acetonitrile | NA | 2.64 | mL | NA | NA | NA |

C. 0.2 μmol Synthesis Cycle 96 well Instrument

| | Equivalents: DNA/ | Amount: DNA/2′-O- | | Wait Time* | | | | | |
|---|---|---|---|---|---|---|---|---|---|
| Reagent | 2′-O-methyl/Ribo | methyl/Ribo | | DNA | | Wait Time* 2′-O-methyl | | Wait Time* Ribo | |
| Phosphoramidites | 22/33/66 | 40/60/120 | μL | 60 | sec | 180 | sec | 360 | sec |
| S-Ethyl Tetrazole | 70/105/210 | 40/60/120 | μL | 60 | sec | 180 | min | 360 | sec |
| Acetic Anhydride | 265/265/265 | 50/50/50 | μL | 10 | sec | 10 | sec | 10 | sec |
| N-Methyl | 502/502/502 | 50/50/50 | μL | 10 | sec | 10 | sec | 10 | sec |
| Imidazole | | | | | | | | | |
| TCA | 238/475/475 | 250/500/500 | μL | 15 | sec | 15 | sec | 15 | sec |
| Iodine | 6.8/6.8/6.8 | 80/80/80 | μL | 30 | sec | 30 | sec | 30 | sec |
| Beaucage | 34/51/51 | 80/120/120 | | 100 | sec | 200 | sec | 200 | sec |

| | | | | | | |
|---|---|---|---|---|---|---|
| Acetonitrile | NA | 1150/1150/1150 | μL | NA | NA | NA |

Wait time does not include contact time during delivery.
Tandem synthesis utilizes double coupling of linker molecule

The application's sequence listing, which the Patent Office published only in electronic form, follows.

SEQUENCE LISTING (4252 sequences)

SEQ ID NO: 1 - RNA, 19 nt, Artificial Sequence
  Description of Artificial Sequence:  Target Sequence/siNA sense region
gcggacacuccucucggcu

SEQ ID NO: 2 - RNA, 19 nt, Artificial Sequence
  Description of Artificial Sequence:  Target Sequence/siNA sense region
uccuccccggcagcggcgg

SEQ ID NO: 3 - RNA, 19 nt, Artificial Sequence
  Description of Artificial Sequence:  Target Sequence/siNA sense region
gcggcucggagcgggcucc

SEQ ID NO: 4 - RNA, 19 nt, Artificial Sequence
  Description of Artificial Sequence:  Target Sequence/siNA sense region
cggggcucgggugcagcgg

SEQ ID NO: 5 - RNA, 19 nt, Artificial Sequence
  Description of Artificial Sequence:  Target Sequence/siNA sense region
gccagcgggccuggcggcg

SEQ ID NO: 6 - RNA, 19 nt, Artificial Sequence
  Description of Artificial Sequence:  Target Sequence/siNA sense region
gaggauuacccggggaagu

SEQ ID NO: 7 - RNA, 19 nt, Artificial Sequence
  Description of Artificial Sequence:  Target Sequence/siNA sense region
ugguugucuccuggcugga

SEQ ID NO: 8 - RNA, 19 nt, Artificial Sequence
  Description of Artificial Sequence:  Target Sequence/siNA sense region
agccgcgagacgggcgcuc

SEQ ID NO: 9 - RNA, 19 nt, Artificial Sequence
  Description of Artificial Sequence:  Target Sequence/siNA sense region
cagggcgcggggccggcgg

SEQ ID NO: 10 - RNA, 19 nt, Artificial Sequence
  Description of Artificial Sequence:  Target Sequence/siNA sense region
gcggcgaacgagaggacgg

SEQ ID NO: 11 - RNA, 19 nt, Artificial Sequence
  Description of Artificial Sequence:  Target Sequence/siNA sense region
gacucuggcggccgggucg

SEQ ID NO: 12 - RNA, 19 nt, Artificial Sequence
  Description of Artificial Sequence:  Target Sequence/siNA sense region
guuggccgggggagcgcgg

SEQ ID NO: 13 - RNA, 19 nt, Artificial Sequence
  Description of Artificial Sequence:  Target Sequence/siNA sense region
ggcaccgggcgagcaggcc

SEQ ID NO: 14 - RNA, 19 nt, Artificial Sequence
  Description of Artificial Sequence:  Target Sequence/siNA sense region
cgcgucgcgcucaccaugg

SEQ ID NO: 15 - RNA, 19 nt, Artificial Sequence
  Description of Artificial Sequence:  Target Sequence/siNA sense region
gucagcuacugggacaccg

SEQ ID NO: 16 - RNA, 19 nt, Artificial Sequence
  Description of Artificial Sequence:  Target Sequence/siNA sense region
gggguccugcugugcgcgc

SEQ ID NO: 17 - RNA, 19 nt, Artificial Sequence
  Description of Artificial Sequence:  Target Sequence/siNA sense region
cugcucagcugucugcuuc

SEQ ID NO: 18 - RNA, 19 nt, Artificial Sequence
  Description of Artificial Sequence:  Target Sequence/siNA sense region
cucacaggaucuaguucag

SEQ ID NO: 19 - RNA, 19 nt, Artificial Sequence
  Description of Artificial Sequence:  Target Sequence/siNA sense region
gguucaaaauuaaaagauc

SEQ ID NO: 20 - RNA, 19 nt, Artificial Sequence
  Description of Artificial Sequence:  Target Sequence/siNA sense region
ccugaacugaguuuaaaag

SEQ ID NO: 21 - RNA, 19 nt, Artificial Sequence
  Description of Artificial Sequence:  Target Sequence/siNA sense region
ggcacccagcacaucaugc

SEQ ID NO: 22 - RNA, 19 nt, Artificial Sequence
  Description of Artificial Sequence:  Target Sequence/siNA sense region
caagcaggccagacacugc

SEQ ID NO: 23 - RNA, 19 nt, Artificial Sequence
  Description of Artificial Sequence:  Target Sequence/siNA sense region
caucuccaaugcagggggg

SEQ ID NO: 24 - RNA, 19 nt, Artificial Sequence
  Description of Artificial Sequence:  Target Sequence/siNA sense region
gaagcagcccauaaauggu

SEQ ID NO: 25 - RNA, 19 nt, Artificial Sequence
  Description of Artificial Sequence:  Target Sequence/siNA sense region
ucuuugccugaaaugguga

SEQ ID NO: 26 - RNA, 19 nt, Artificial Sequence
  Description of Artificial Sequence:  Target Sequence/siNA sense region
aguaaggaaagcgaaaggc

SEQ ID NO: 27 - RNA, 19 nt, Artificial Sequence
  Description of Artificial Sequence:  Target Sequence/siNA sense region
cugagcauaacuaaaucug

SEQ ID NO: 28 - RNA, 19 nt, Artificial Sequence
  Description of Artificial Sequence:  Target Sequence/siNA sense region
gccuguggaagaaauggca

SEQ ID NO: 29 - RNA, 19 nt, Artificial Sequence
  Description of Artificial Sequence:  Target Sequence/siNA sense region
aaacaauucugcaguacuu

SEQ ID NO: 30 - RNA, 19 nt, Artificial Sequence
  Description of Artificial Sequence:  Target Sequence/siNA sense region
uuaaccuugaacacagcuc

SEQ ID NO: 31 - RNA, 19 nt, Artificial Sequence
  Description of Artificial Sequence:  Target Sequence/siNA sense region
caagcaaaccacacuggcu

SEQ ID NO: 32 - RNA, 19 nt, Artificial Sequence
  Description of Artificial Sequence:  Target Sequence/siNA sense region
uucuacagcugcaaauauc

SEQ ID NO: 33 - RNA, 19 nt, Artificial Sequence
  Description of Artificial Sequence:  Target Sequence/siNA sense region
cuagcuguaccuacuucaa

SEQ ID NO: 34 - RNA, 19 nt, Artificial Sequence
  Description of Artificial Sequence:  Target Sequence/siNA sense region
aagaagaaggaaacagaau

SEQ ID NO: 35 - RNA, 19 nt, Artificial Sequence
  Description of Artificial Sequence:  Target Sequence/siNA sense region
ucugcaaucuauauauuua

SEQ ID NO: 36 - RNA, 19 nt, Artificial Sequence
  Description of Artificial Sequence:  Target Sequence/siNA sense region
auuagugauacagguagac

SEQ ID NO: 37 - RNA, 19 nt, Artificial Sequence
  Description of Artificial Sequence:  Target Sequence/siNA sense region
ccuuucguagagauguaca

SEQ ID NO: 38 - RNA, 19 nt, Artificial Sequence
  Description of Artificial Sequence:  Target Sequence/siNA sense region
agugaaauccccgaaauua

SEQ ID NO: 39 - RNA, 19 nt, Artificial Sequence
  Description of Artificial Sequence:  Target Sequence/siNA sense region
auacacaugacugaaggaa

SEQ ID NO: 40 - RNA, 19 nt, Artificial Sequence
  Description of Artificial Sequence:  Target Sequence/siNA sense region
agggagcucgucauucccu

SEQ ID NO: 41 - RNA, 19 nt, Artificial Sequence
  Description of Artificial Sequence:  Target Sequence/siNA sense region
ugccggguuacgucaccua

SEQ ID NO: 42 - RNA, 19 nt, Artificial Sequence
  Description of Artificial Sequence:  Target Sequence/siNA sense region
aacaucacuguuacuuuaa

SEQ ID NO: 43 - RNA, 19 nt, Artificial Sequence
  Description of Artificial Sequence:  Target Sequence/siNA sense region
aaaaaguuuccacuugaca

SEQ ID NO: 44 - RNA, 19 nt, Artificial Sequence
  Description of Artificial Sequence:  Target Sequence/siNA sense region
acuuugaucccugauggaa

SEQ ID NO: 45 - RNA, 19 nt, Artificial Sequence
  Description of Artificial Sequence:  Target Sequence/siNA sense region
aaacgcauaaucugggaca

SEQ ID NO: 46 - RNA, 19 nt, Artificial Sequence
  Description of Artificial Sequence:  Target Sequence/siNA sense region
aguagaaagggcuucauca

SEQ ID NO: 47 - RNA, 19 nt, Artificial Sequence
  Description of Artificial Sequence:  Target Sequence/siNA sense region
auaucaaaugcaacguaca

SEQ ID NO: 48 - RNA, 19 nt, Artificial Sequence
  Description of Artificial Sequence:  Target Sequence/siNA sense region
aaagaaauagggcuucuga

SEQ ID NO: 49 - RNA, 19 nt, Artificial Sequence
  Description of Artificial Sequence:  Target Sequence/siNA sense region
accugugaagcaacaguca

SEQ ID NO: 50 - RNA, 19 nt, Artificial Sequence
  Description of Artificial Sequence:  Target Sequence/siNA sense region
aaugggcauuuguauaaga

SEQ ID NO: 51 - RNA, 19 nt, Artificial Sequence
  Description of Artificial Sequence:  Target Sequence/siNA sense region
acaaacuaucucacacauc

SEQ ID NO: 52 - RNA, 19 nt, Artificial Sequence
  Description of Artificial Sequence:  Target Sequence/siNA sense region
cgacaaaccaauacaauca

SEQ ID NO: 53 - RNA, 19 nt, Artificial Sequence
  Description of Artificial Sequence:  Target Sequence/siNA sense region
auagauguccaaauaagca

SEQ ID NO: 54 - RNA, 19 nt, Artificial Sequence
  Description of Artificial Sequence:  Target Sequence/siNA sense region
acaccacgcccagucaaau

SEQ ID NO: 55 - RNA, 19 nt, Artificial Sequence
  Description of Artificial Sequence:  Target Sequence/siNA sense region
uuacuuagaggccauacuc

SEQ ID NO: 56 - RNA, 19 nt, Artificial Sequence
  Description of Artificial Sequence:  Target Sequence/siNA sense region
cuuguccucaauuguacug

SEQ ID NO: 57 - RNA, 19 nt, Artificial Sequence
  Description of Artificial Sequence:  Target Sequence/siNA sense region
gcuaccacucccuugaaca

SEQ ID NO: 58 - RNA, 19 nt, Artificial Sequence
  Description of Artificial Sequence:  Target Sequence/siNA sense region
acgagaguucaaaugaccu

SEQ ID NO: 59 - RNA, 19 nt, Artificial Sequence
  Description of Artificial Sequence:  Target Sequence/siNA sense region
uggaguuacccugaugaaa

SEQ ID NO: 60 - RNA, 19 nt, Artificial Sequence
  Description of Artificial Sequence:  Target Sequence/siNA sense region
aaaaauaagagagcuuccg

SEQ ID NO: 61 - RNA, 19 nt, Artificial Sequence
  Description of Artificial Sequence:  Target Sequence/siNA sense region
guaaggcgacgaauugacc

SEQ ID NO: 62 - RNA, 19 nt, Artificial Sequence
  Description of Artificial Sequence:  Target Sequence/siNA sense region
caaagcaauucccaugcca

SEQ ID NO: 63 - RNA, 19 nt, Artificial Sequence
  Description of Artificial Sequence:  Target Sequence/siNA sense region
aacauauucuacaguguuc

SEQ ID NO: 64 - RNA, 19 nt, Artificial Sequence
  Description of Artificial Sequence:  Target Sequence/siNA sense region
cuuacuauugacaaaaugc

SEQ ID NO: 65 - RNA, 19 nt, Artificial Sequence
  Description of Artificial Sequence:  Target Sequence/siNA sense region
cagaacaaagacaaaggac

SEQ ID NO: 66 - RNA, 19 nt, Artificial Sequence
  Description of Artificial Sequence:  Target Sequence/siNA sense region
cuuuauacuugucguguaa

SEQ ID NO: 67 - RNA, 19 nt, Artificial Sequence
  Description of Artificial Sequence:  Target Sequence/siNA sense region
aggaguggaccaucauuca

SEQ ID NO: 68 - RNA, 19 nt, Artificial Sequence
  Description of Artificial Sequence:  Target Sequence/siNA sense region
aaaucuguuaacaccucag

SEQ ID NO: 69 - RNA, 19 nt, Artificial Sequence
  Description of Artificial Sequence:  Target Sequence/siNA sense region
gugcauauauaugauaaag

SEQ ID NO: 70 - RNA, 19 nt, Artificial Sequence
  Description of Artificial Sequence:  Target Sequence/siNA sense region
gcauucaucacugugaaac

SEQ ID NO: 71 - RNA, 19 nt, Artificial Sequence
  Description of Artificial Sequence:  Target Sequence/siNA sense region
caucgaaaacagcaggugc

SEQ ID NO: 72 - RNA, 19 nt, Artificial Sequence
  Description of Artificial Sequence:  Target Sequence/siNA sense region
cuugaaaccguagcuggca

SEQ ID NO: 73 - RNA, 19 nt, Artificial Sequence
  Description of Artificial Sequence:  Target Sequence/siNA sense region
aagcggucuuaccggcucu

SEQ ID NO: 74 - RNA, 19 nt, Artificial Sequence
  Description of Artificial Sequence:  Target Sequence/siNA sense region
ucuaugaaagugaaggcau

SEQ ID NO: 75 - RNA, 19 nt, Artificial Sequence
  Description of Artificial Sequence:  Target Sequence/siNA sense region
uuucccucgccggaaguug

SEQ ID NO: 76 - RNA, 19 nt, Artificial Sequence
  Description of Artificial Sequence:  Target Sequence/siNA sense region
guaugguuaaaagaugggu

SEQ ID NO: 77 - RNA, 19 nt, Artificial Sequence
  Description of Artificial Sequence:  Target Sequence/siNA sense region
uuaccugcgacugagaaau

SEQ ID NO: 78 - RNA, 19 nt, Artificial Sequence
  Description of Artificial Sequence:  Target Sequence/siNA sense region
ucugcucgcuauuugacuc

SEQ ID NO: 79 - RNA, 19 nt, Artificial Sequence
  Description of Artificial Sequence:  Target Sequence/siNA sense region
cguggcuacucguuaauua

SEQ ID NO: 80 - RNA, 19 nt, Artificial Sequence
  Description of Artificial Sequence:  Target Sequence/siNA sense region
aucaaggacguaacugaag

SEQ ID NO: 81 - RNA, 19 nt, Artificial Sequence
  Description of Artificial Sequence:  Target Sequence/siNA sense region
gaggaugcagggaauuaua

SEQ ID NO: 82 - RNA, 19 nt, Artificial Sequence
  Description of Artificial Sequence:  Target Sequence/siNA sense region
acaaucuugcugagcauaa

SEQ ID NO: 83 - RNA, 19 nt, Artificial Sequence
  Description of Artificial Sequence:  Target Sequence/siNA sense region
aaacagucaaauguguuua

SEQ ID NO: 84 - RNA, 19 nt, Artificial Sequence
  Description of Artificial Sequence:  Target Sequence/siNA sense region
aaaaaccucacugccacuc

SEQ ID NO: 85 - RNA, 19 nt, Artificial Sequence
  Description of Artificial Sequence:  Target Sequence/siNA sense region
cuaauugucaaugugaaac

SEQ ID NO: 86 - RNA, 19 nt, Artificial Sequence
  Description of Artificial Sequence:  Target Sequence/siNA sense region
ccccagauuuacgaaaagg

SEQ ID NO: 87 - RNA, 19 nt, Artificial Sequence
  Description of Artificial Sequence:  Target Sequence/siNA sense region
gccgugucaucguuuccag

SEQ ID NO: 88 - RNA, 19 nt, Artificial Sequence
  Description of Artificial Sequence:  Target Sequence/siNA sense region
gacccggcucucuacccac

SEQ ID NO: 89 - RNA, 19 nt, Artificial Sequence
  Description of Artificial Sequence:  Target Sequence/siNA sense region
cugggcagcagacaaaucc

SEQ ID NO: 90 - RNA, 19 nt, Artificial Sequence
  Description of Artificial Sequence:  Target Sequence/siNA sense region
cugacuuguaccgcauaug

SEQ ID NO: 91 - RNA, 19 nt, Artificial Sequence
  Description of Artificial Sequence:  Target Sequence/siNA sense region
gguaucccucaaccuacaa

SEQ ID NO: 92 - RNA, 19 nt, Artificial Sequence
  Description of Artificial Sequence:  Target Sequence/siNA sense region
aucaagugguucuggcacc

SEQ ID NO: 93 - RNA, 19 nt, Artificial Sequence
  Description of Artificial Sequence:  Target Sequence/siNA sense region
cccuguaaccauaaucauu

SEQ ID NO: 94 - RNA, 19 nt, Artificial Sequence
  Description of Artificial Sequence:  Target Sequence/siNA sense region
uccgaagcaaggugugacu

SEQ ID NO: 95 - RNA, 19 nt, Artificial Sequence
  Description of Artificial Sequence:  Target Sequence/siNA sense region
uuuuguuccaauaaugaag

SEQ ID NO: 96 - RNA, 19 nt, Artificial Sequence
  Description of Artificial Sequence:  Target Sequence/siNA sense region
gaguccuuuauccuggaug

SEQ ID NO: 97 - RNA, 19 nt, Artificial Sequence
  Description of Artificial Sequence:  Target Sequence/siNA sense region
gcugacagcaacaugggaa

SEQ ID NO: 98 - RNA, 19 nt, Artificial Sequence
  Description of Artificial Sequence:  Target Sequence/siNA sense region
aacagaauugagagcauca

SEQ ID NO: 99 - RNA, 19 nt, Artificial Sequence
  Description of Artificial Sequence:  Target Sequence/siNA sense region
acucagcgcauggcaauaa

SEQ ID NO: 100 - RNA, 19 nt, Artificial Sequence
  Description of Artificial Sequence:  Target Sequence/siNA sense region
auagaaggaaagaauaaga

SEQ ID NO: 101 - RNA, 19 nt, Artificial Sequence
  Description of Artificial Sequence:  Target Sequence/siNA sense region
auggcuagcaccuugguug

SEQ ID NO: 102 - RNA, 19 nt, Artificial Sequence
  Description of Artificial Sequence:  Target Sequence/siNA sense region
guggcugacucuagaauuu

SEQ ID NO: 103 - RNA, 19 nt, Artificial Sequence
  Description of Artificial Sequence:  Target Sequence/siNA sense region
ucuggaaucuacauuugca

SEQ ID NO: 104 - RNA, 19 nt, Artificial Sequence
  Description of Artificial Sequence:  Target Sequence/siNA sense region
auagcuuccaauaaaguug

SEQ ID NO: 105 - RNA, 19 nt, Artificial Sequence
  Description of Artificial Sequence:  Target Sequence/siNA sense region
gggacugugggaagaaaca

SEQ ID NO: 106 - RNA, 19 nt, Artificial Sequence
  Description of Artificial Sequence:  Target Sequence/siNA sense region
auaagcuuuuauaucacag

SEQ ID NO: 107 - RNA, 19 nt, Artificial Sequence
  Description of Artificial Sequence:  Target Sequence/siNA sense region
gaugugccaaauggguuuc

SEQ ID NO: 108 - RNA, 19 nt, Artificial Sequence
  Description of Artificial Sequence:  Target Sequence/siNA sense region
cauguuaacuuggaaaaaa

SEQ ID NO: 109 - RNA, 19 nt, Artificial Sequence
  Description of Artificial Sequence:  Target Sequence/siNA sense region
augccgacggaaggagagg

SEQ ID NO: 110 - RNA, 19 nt, Artificial Sequence
  Description of Artificial Sequence:  Target Sequence/siNA sense region
gaccugaaacugucuugca

SEQ ID NO: 111 - RNA, 19 nt, Artificial Sequence
  Description of Artificial Sequence:  Target Sequence/siNA sense region
acaguuaacaaguucuuau

SEQ ID NO: 112 - RNA, 19 nt, Artificial Sequence
  Description of Artificial Sequence:  Target Sequence/siNA sense region
uacagagacguuacuugga

SEQ ID NO: 113 - RNA, 19 nt, Artificial Sequence
  Description of Artificial Sequence:  Target Sequence/siNA sense region
auuuuacugcggacaguua

SEQ ID NO: 114 - RNA, 19 nt, Artificial Sequence
  Description of Artificial Sequence:  Target Sequence/siNA sense region
aauaacagaacaaugcacu

SEQ ID NO: 115 - RNA, 19 nt, Artificial Sequence
  Description of Artificial Sequence:  Target Sequence/siNA sense region
uacaguauuagcaagcaaa

SEQ ID NO: 116 - RNA, 19 nt, Artificial Sequence
  Description of Artificial Sequence:  Target Sequence/siNA sense region
aaaauggccaucacuaagg

SEQ ID NO: 117 - RNA, 19 nt, Artificial Sequence
  Description of Artificial Sequence:  Target Sequence/siNA sense region
gagcacuccaucacucuua

SEQ ID NO: 118 - RNA, 19 nt, Artificial Sequence
  Description of Artificial Sequence:  Target Sequence/siNA sense region
aaucuuaccaucaugaaug

SEQ ID NO: 119 - RNA, 19 nt, Artificial Sequence
  Description of Artificial Sequence:  Target Sequence/siNA sense region
guuucccugcaagauucag

SEQ ID NO: 120 - RNA, 19 nt, Artificial Sequence
  Description of Artificial Sequence:  Target Sequence/siNA sense region
ggcaccuaugccugcagag

SEQ ID NO: 121 - RNA, 19 nt, Artificial Sequence
  Description of Artificial Sequence:  Target Sequence/siNA sense region
gccaggaauguauacacag

SEQ ID NO: 122 - RNA, 19 nt, Artificial Sequence
  Description of Artificial Sequence:  Target Sequence/siNA sense region
ggggaagaaauccuccaga

SEQ ID NO: 123 - RNA, 19 nt, Artificial Sequence
  Description of Artificial Sequence:  Target Sequence/siNA sense region
aagaaagaaauuacaauca

SEQ ID NO: 124 - RNA, 19 nt, Artificial Sequence
  Description of Artificial Sequence:  Target Sequence/siNA sense region
agagaucaggaagcaccau

SEQ ID NO: 125 - RNA, 19 nt, Artificial Sequence
  Description of Artificial Sequence:  Target Sequence/siNA sense region
uaccuccugcgaaaccuca

SEQ ID NO: 126 - RNA, 19 nt, Artificial Sequence
  Description of Artificial Sequence:  Target Sequence/siNA sense region
agugaucacacaguggcca

SEQ ID NO: 127 - RNA, 19 nt, Artificial Sequence
  Description of Artificial Sequence:  Target Sequence/siNA sense region
aucagcaguuccaccacuu

SEQ ID NO: 128 - RNA, 19 nt, Artificial Sequence
  Description of Artificial Sequence:  Target Sequence/siNA sense region
uuagacugucaugcuaaug

SEQ ID NO: 129 - RNA, 19 nt, Artificial Sequence
  Description of Artificial Sequence:  Target Sequence/siNA sense region
gguguccccgagccucaga

SEQ ID NO: 130 - RNA, 19 nt, Artificial Sequence
  Description of Artificial Sequence:  Target Sequence/siNA sense region
aucacuugguuuaaaaaca

SEQ ID NO: 131 - RNA, 19 nt, Artificial Sequence
  Description of Artificial Sequence:  Target Sequence/siNA sense region
aaccacaaaauacaacaag

SEQ ID NO: 132 - RNA, 19 nt, Artificial Sequence
  Description of Artificial Sequence:  Target Sequence/siNA sense region
gagccuggaauuauuuuag

SEQ ID NO: 133 - RNA, 19 nt, Artificial Sequence
  Description of Artificial Sequence:  Target Sequence/siNA sense region
ggaccaggaagcagcacgc

SEQ ID NO: 134 - RNA, 19 nt, Artificial Sequence
  Description of Artificial Sequence:  Target Sequence/siNA sense region
cuguuuauugaaagaguca

SEQ ID NO: 135 - RNA, 19 nt, Artificial Sequence
  Description of Artificial Sequence:  Target Sequence/siNA sense region
acagaagaggaugaaggug

SEQ ID NO: 136 - RNA, 19 nt, Artificial Sequence
  Description of Artificial Sequence:  Target Sequence/siNA sense region
gucuaucacugcaaagcca

SEQ ID NO: 137 - RNA, 19 nt, Artificial Sequence
  Description of Artificial Sequence:  Target Sequence/siNA sense region
accaaccagaagggcucug

SEQ ID NO: 138 - RNA, 19 nt, Artificial Sequence
  Description of Artificial Sequence:  Target Sequence/siNA sense region
guggaaaguucagcauacc

SEQ ID NO: 139 - RNA, 19 nt, Artificial Sequence
  Description of Artificial Sequence:  Target Sequence/siNA sense region
cucacuguucaaggaaccu

SEQ ID NO: 140 - RNA, 19 nt, Artificial Sequence
  Description of Artificial Sequence:  Target Sequence/siNA sense region
ucggacaagucuaaucugg

SEQ ID NO: 141 - RNA, 19 nt, Artificial Sequence
  Description of Artificial Sequence:  Target Sequence/siNA sense region
gagcugaucacucuaacau

SEQ ID NO: 142 - RNA, 19 nt, Artificial Sequence
  Description of Artificial Sequence:  Target Sequence/siNA sense region
ugcaccuguguggcugcga

SEQ ID NO: 143 - RNA, 19 nt, Artificial Sequence
  Description of Artificial Sequence:  Target Sequence/siNA sense region
acucucuucuggcuccuau

SEQ ID NO: 144 - RNA, 19 nt, Artificial Sequence
  Description of Artificial Sequence:  Target Sequence/siNA sense region
uuaacccuccuuauccgaa

SEQ ID NO: 145 - RNA, 19 nt, Artificial Sequence
  Description of Artificial Sequence:  Target Sequence/siNA sense region
aaaaugaaaaggucuucuu

SEQ ID NO: 146 - RNA, 19 nt, Artificial Sequence
  Description of Artificial Sequence:  Target Sequence/siNA sense region
ucugaaauaaagacugacu

SEQ ID NO: 147 - RNA, 19 nt, Artificial Sequence
  Description of Artificial Sequence:  Target Sequence/siNA sense region
uaccuaucaauuauaaugg

SEQ ID NO: 148 - RNA, 19 nt, Artificial Sequence
  Description of Artificial Sequence:  Target Sequence/siNA sense region
gacccagaugaaguuccuu

SEQ ID NO: 149 - RNA, 19 nt, Artificial Sequence
  Description of Artificial Sequence:  Target Sequence/siNA sense region
uuggaugagcagugugagc

SEQ ID NO: 150 - RNA, 19 nt, Artificial Sequence
  Description of Artificial Sequence:  Target Sequence/siNA sense region
cggcucccuuaugaugcca

SEQ ID NO: 151 - RNA, 19 nt, Artificial Sequence
  Description of Artificial Sequence:  Target Sequence/siNA sense region
agcaagugggaguuugccc

SEQ ID NO: 152 - RNA, 19 nt, Artificial Sequence
  Description of Artificial Sequence:  Target Sequence/siNA sense region
cgggagagacuuaaacugg

SEQ ID NO: 153 - RNA, 19 nt, Artificial Sequence
  Description of Artificial Sequence:  Target Sequence/siNA sense region
ggcaaaucacuuggaagag

SEQ ID NO: 154 - RNA, 19 nt, Artificial Sequence
  Description of Artificial Sequence:  Target Sequence/siNA sense region
ggggcuuuuggaaaagugg

SEQ ID NO: 155 - RNA, 19 nt, Artificial Sequence
  Description of Artificial Sequence:  Target Sequence/siNA sense region
guucaagcaucagcauuug

SEQ ID NO: 156 - RNA, 19 nt, Artificial Sequence
  Description of Artificial Sequence:  Target Sequence/siNA sense region
ggcauuaagaaaucaccua

SEQ ID NO: 157 - RNA, 19 nt, Artificial Sequence
  Description of Artificial Sequence:  Target Sequence/siNA sense region
acgugccggacuguggcug

SEQ ID NO: 158 - RNA, 19 nt, Artificial Sequence
  Description of Artificial Sequence:  Target Sequence/siNA sense region
gugaaaaugcugaaagagg

SEQ ID NO: 159 - RNA, 19 nt, Artificial Sequence
  Description of Artificial Sequence:  Target Sequence/siNA sense region
ggggccacggccagcgagu

SEQ ID NO: 160 - RNA, 19 nt, Artificial Sequence
  Description of Artificial Sequence:  Target Sequence/siNA sense region
uacaaagcucugaugacug

SEQ ID NO: 161 - RNA, 19 nt, Artificial Sequence
  Description of Artificial Sequence:  Target Sequence/siNA sense region
gagcuaaaaaucuugaccc

SEQ ID NO: 162 - RNA, 19 nt, Artificial Sequence
  Description of Artificial Sequence:  Target Sequence/siNA sense region
cacauuggccaccaucuga

SEQ ID NO: 163 - RNA, 19 nt, Artificial Sequence
  Description of Artificial Sequence:  Target Sequence/siNA sense region
aacgugguuaaccugcugg

SEQ ID NO: 164 - RNA, 19 nt, Artificial Sequence
  Description of Artificial Sequence:  Target Sequence/siNA sense region
ggagccugcaccaagcaag

SEQ ID NO: 165 - RNA, 19 nt, Artificial Sequence
  Description of Artificial Sequence:  Target Sequence/siNA sense region
ggagggccucugaugguga

SEQ ID NO: 166 - RNA, 19 nt, Artificial Sequence
  Description of Artificial Sequence:  Target Sequence/siNA sense region
auuguugaauacugcaaau

SEQ ID NO: 167 - RNA, 19 nt, Artificial Sequence
  Description of Artificial Sequence:  Target Sequence/siNA sense region
uauggaaaucucuccaacu

SEQ ID NO: 168 - RNA, 19 nt, Artificial Sequence
  Description of Artificial Sequence:  Target Sequence/siNA sense region
uaccucaagagcaaacgug

SEQ ID NO: 169 - RNA, 19 nt, Artificial Sequence
  Description of Artificial Sequence:  Target Sequence/siNA sense region
gacuuauuuuuucucaaca

SEQ ID NO: 170 - RNA, 19 nt, Artificial Sequence
  Description of Artificial Sequence:  Target Sequence/siNA sense region
aaggaugcagcacuacaca

SEQ ID NO: 171 - RNA, 19 nt, Artificial Sequence
  Description of Artificial Sequence:  Target Sequence/siNA sense region
auggagccuaagaaagaaa

SEQ ID NO: 172 - RNA, 19 nt, Artificial Sequence
  Description of Artificial Sequence:  Target Sequence/siNA sense region
aaaauggagccaggccugg

SEQ ID NO: 173 - RNA, 19 nt, Artificial Sequence
  Description of Artificial Sequence:  Target Sequence/siNA sense region
gaacaaggcaagaaaccaa

SEQ ID NO: 174 - RNA, 19 nt, Artificial Sequence
  Description of Artificial Sequence:  Target Sequence/siNA sense region
agacuagauagcgucacca

SEQ ID NO: 175 - RNA, 19 nt, Artificial Sequence
  Description of Artificial Sequence:  Target Sequence/siNA sense region
agcagcgaaagcuuugcga

SEQ ID NO: 176 - RNA, 19 nt, Artificial Sequence
  Description of Artificial Sequence:  Target Sequence/siNA sense region
agcuccggcuuucaggaag

SEQ ID NO: 177 - RNA, 19 nt, Artificial Sequence
  Description of Artificial Sequence:  Target Sequence/siNA sense region
gauaaaagucugagugaug

SEQ ID NO: 178 - RNA, 19 nt, Artificial Sequence
  Description of Artificial Sequence:  Target Sequence/siNA sense region
guugaggaagaggaggauu

SEQ ID NO: 179 - RNA, 19 nt, Artificial Sequence
  Description of Artificial Sequence:  Target Sequence/siNA sense region
ucugacgguuucuacaagg

SEQ ID NO: 180 - RNA, 19 nt, Artificial Sequence
  Description of Artificial Sequence:  Target Sequence/siNA sense region
gagcccaucacuauggaag

SEQ ID NO: 181 - RNA, 19 nt, Artificial Sequence
  Description of Artificial Sequence:  Target Sequence/siNA sense region
gaucugauuucuuacaguu

SEQ ID NO: 182 - RNA, 19 nt, Artificial Sequence
  Description of Artificial Sequence:  Target Sequence/siNA sense region
uuucaaguggccagaggca

SEQ ID NO: 183 - RNA, 19 nt, Artificial Sequence
  Description of Artificial Sequence:  Target Sequence/siNA sense region
auggaguuccugucuucca

SEQ ID NO: 184 - RNA, 19 nt, Artificial Sequence
  Description of Artificial Sequence:  Target Sequence/siNA sense region
agaaagugcauucaucggg

SEQ ID NO: 185 - RNA, 19 nt, Artificial Sequence
  Description of Artificial Sequence:  Target Sequence/siNA sense region
gaccuggcagcgagaaaca

SEQ ID NO: 186 - RNA, 19 nt, Artificial Sequence
  Description of Artificial Sequence:  Target Sequence/siNA sense region
auucuuuuaucugagaaca

SEQ ID NO: 187 - RNA, 19 nt, Artificial Sequence
  Description of Artificial Sequence:  Target Sequence/siNA sense region
aacguggugaagauuugug

SEQ ID NO: 188 - RNA, 19 nt, Artificial Sequence
  Description of Artificial Sequence:  Target Sequence/siNA sense region
gauuuuggccuugcccggg

SEQ ID NO: 189 - RNA, 19 nt, Artificial Sequence
  Description of Artificial Sequence:  Target Sequence/siNA sense region
gauauuuauaagaaccccg

SEQ ID NO: 190 - RNA, 19 nt, Artificial Sequence
  Description of Artificial Sequence:  Target Sequence/siNA sense region
gauuaugugagaaaaggag

SEQ ID NO: 191 - RNA, 19 nt, Artificial Sequence
  Description of Artificial Sequence:  Target Sequence/siNA sense region
gauacucgacuuccucuga

SEQ ID NO: 192 - RNA, 19 nt, Artificial Sequence
  Description of Artificial Sequence:  Target Sequence/siNA sense region
aaauggauggcucccgaau

SEQ ID NO: 193 - RNA, 19 nt, Artificial Sequence
  Description of Artificial Sequence:  Target Sequence/siNA sense region
ucuaucuuugacaaaaucu

SEQ ID NO: 194 - RNA, 19 nt, Artificial Sequence
  Description of Artificial Sequence:  Target Sequence/siNA sense region
uacagcaccaagagcgacg

SEQ ID NO: 195 - RNA, 19 nt, Artificial Sequence
  Description of Artificial Sequence:  Target Sequence/siNA sense region
guguggucuuacggaguau

SEQ ID NO: 196 - RNA, 19 nt, Artificial Sequence
  Description of Artificial Sequence:  Target Sequence/siNA sense region
uugcugugggaaaucuucu

SEQ ID NO: 197 - RNA, 19 nt, Artificial Sequence
  Description of Artificial Sequence:  Target Sequence/siNA sense region
uccuuaggugggucuccau

SEQ ID NO: 198 - RNA, 19 nt, Artificial Sequence
  Description of Artificial Sequence:  Target Sequence/siNA sense region
uacccaggaguacaaaugg

SEQ ID NO: 199 - RNA, 19 nt, Artificial Sequence
  Description of Artificial Sequence:  Target Sequence/siNA sense region
gaugaggacuuuugcaguc

SEQ ID NO: 200 - RNA, 19 nt, Artificial Sequence
  Description of Artificial Sequence:  Target Sequence/siNA sense region
cgccugagggaaggcauga

SEQ ID NO: 201 - RNA, 19 nt, Artificial Sequence
  Description of Artificial Sequence:  Target Sequence/siNA sense region
aggaugagagcuccugagu

SEQ ID NO: 202 - RNA, 19 nt, Artificial Sequence
  Description of Artificial Sequence:  Target Sequence/siNA sense region
uacucuacuccugaaaucu

SEQ ID NO: 203 - RNA, 19 nt, Artificial Sequence
  Description of Artificial Sequence:  Target Sequence/siNA sense region
uaucagaucaugcuggacu

SEQ ID NO: 204 - RNA, 19 nt, Artificial Sequence
  Description of Artificial Sequence:  Target Sequence/siNA sense region
ugcuggcacagagacccaa

SEQ ID NO: 205 - RNA, 19 nt, Artificial Sequence
  Description of Artificial Sequence:  Target Sequence/siNA sense region
aaagaaaggccaagauuug

SEQ ID NO: 206 - RNA, 19 nt, Artificial Sequence
  Description of Artificial Sequence:  Target Sequence/siNA sense region
gcagaacuuguggaaaaac

SEQ ID NO: 207 - RNA, 19 nt, Artificial Sequence
  Description of Artificial Sequence:  Target Sequence/siNA sense region
cuaggugauuugcuucaag

SEQ ID NO: 208 - RNA, 19 nt, Artificial Sequence
  Description of Artificial Sequence:  Target Sequence/siNA sense region
gcaaauguacaacaggaug

SEQ ID NO: 209 - RNA, 19 nt, Artificial Sequence
  Description of Artificial Sequence:  Target Sequence/siNA sense region
gguaaagacuacaucccaa

SEQ ID NO: 210 - RNA, 19 nt, Artificial Sequence
  Description of Artificial Sequence:  Target Sequence/siNA sense region
aucaaugccauacugacag

SEQ ID NO: 211 - RNA, 19 nt, Artificial Sequence
  Description of Artificial Sequence:  Target Sequence/siNA sense region
ggaaauaguggguuuacau

SEQ ID NO: 212 - RNA, 19 nt, Artificial Sequence
  Description of Artificial Sequence:  Target Sequence/siNA sense region
uacucaacuccugccuucu

SEQ ID NO: 213 - RNA, 19 nt, Artificial Sequence
  Description of Artificial Sequence:  Target Sequence/siNA sense region
ucugaggacuucuucaagg

SEQ ID NO: 214 - RNA, 19 nt, Artificial Sequence
  Description of Artificial Sequence:  Target Sequence/siNA sense region
gaaaguauuucagcuccga

SEQ ID NO: 215 - RNA, 19 nt, Artificial Sequence
  Description of Artificial Sequence:  Target Sequence/siNA sense region
aaguuuaauucaggaagcu

SEQ ID NO: 216 - RNA, 19 nt, Artificial Sequence
  Description of Artificial Sequence:  Target Sequence/siNA sense region
ucugaugaugucagauaug

SEQ ID NO: 217 - RNA, 19 nt, Artificial Sequence
  Description of Artificial Sequence:  Target Sequence/siNA sense region
guaaaugcuuucaaguuca

SEQ ID NO: 218 - RNA, 19 nt, Artificial Sequence
  Description of Artificial Sequence:  Target Sequence/siNA sense region
augagccuggaaagaauca

SEQ ID NO: 219 - RNA, 19 nt, Artificial Sequence
  Description of Artificial Sequence:  Target Sequence/siNA sense region
aaaaccuuugaagaacuuu

SEQ ID NO: 220 - RNA, 19 nt, Artificial Sequence
  Description of Artificial Sequence:  Target Sequence/siNA sense region
uuaccgaaugccaccucca

SEQ ID NO: 221 - RNA, 19 nt, Artificial Sequence
  Description of Artificial Sequence:  Target Sequence/siNA sense region
auguuugaugacuaccagg

SEQ ID NO: 222 - RNA, 19 nt, Artificial Sequence
  Description of Artificial Sequence:  Target Sequence/siNA sense region
ggcgacagcagcacucugu

SEQ ID NO: 223 - RNA, 19 nt, Artificial Sequence
  Description of Artificial Sequence:  Target Sequence/siNA sense region
uuggccucucccaugcuga

SEQ ID NO: 224 - RNA, 19 nt, Artificial Sequence
  Description of Artificial Sequence:  Target Sequence/siNA sense region
aagcgcuucaccuggacug

SEQ ID NO: 225 - RNA, 19 nt, Artificial Sequence
  Description of Artificial Sequence:  Target Sequence/siNA sense region
gacagcaaacccaaggccu

SEQ ID NO: 226 - RNA, 19 nt, Artificial Sequence
  Description of Artificial Sequence:  Target Sequence/siNA sense region
ucgcucaagauugacuuga

SEQ ID NO: 227 - RNA, 19 nt, Artificial Sequence
  Description of Artificial Sequence:  Target Sequence/siNA sense region
agaguaaccaguaaaagua

SEQ ID NO: 228 - RNA, 19 nt, Artificial Sequence
  Description of Artificial Sequence:  Target Sequence/siNA sense region
aaggagucggggcugucug

SEQ ID NO: 229 - RNA, 19 nt, Artificial Sequence
  Description of Artificial Sequence:  Target Sequence/siNA sense region
gaugucagcaggcccaguu

SEQ ID NO: 230 - RNA, 19 nt, Artificial Sequence
  Description of Artificial Sequence:  Target Sequence/siNA sense region
uucugccauuccagcugug

SEQ ID NO: 231 - RNA, 19 nt, Artificial Sequence
  Description of Artificial Sequence:  Target Sequence/siNA sense region
gggcacgucagcgaaggca

SEQ ID NO: 232 - RNA, 19 nt, Artificial Sequence
  Description of Artificial Sequence:  Target Sequence/siNA sense region
aagcgcagguucaccuacg

SEQ ID NO: 233 - RNA, 19 nt, Artificial Sequence
  Description of Artificial Sequence:  Target Sequence/siNA sense region
gaccacgcugagcuggaaa

SEQ ID NO: 234 - RNA, 19 nt, Artificial Sequence
  Description of Artificial Sequence:  Target Sequence/siNA sense region
aggaaaaucgcgugcugcu

SEQ ID NO: 235 - RNA, 19 nt, Artificial Sequence
  Description of Artificial Sequence:  Target Sequence/siNA sense region
uccccgcccccagacuaca

SEQ ID NO: 236 - RNA, 19 nt, Artificial Sequence
  Description of Artificial Sequence:  Target Sequence/siNA sense region
aacucggugguccuguacu

SEQ ID NO: 237 - RNA, 19 nt, Artificial Sequence
  Description of Artificial Sequence:  Target Sequence/siNA sense region
uccaccccacccaucuaga

SEQ ID NO: 238 - RNA, 19 nt, Artificial Sequence
  Description of Artificial Sequence:  Target Sequence/siNA sense region
aguuugacacgaagccuua

SEQ ID NO: 239 - RNA, 19 nt, Artificial Sequence
  Description of Artificial Sequence:  Target Sequence/siNA sense region
auuucuagaagcacaugug

SEQ ID NO: 240 - RNA, 19 nt, Artificial Sequence
  Description of Artificial Sequence:  Target Sequence/siNA sense region
guauuuauacccccaggaa

SEQ ID NO: 241 - RNA, 19 nt, Artificial Sequence
  Description of Artificial Sequence:  Target Sequence/siNA sense region
aacuagcuuuugccaguau

SEQ ID NO: 242 - RNA, 19 nt, Artificial Sequence
  Description of Artificial Sequence:  Target Sequence/siNA sense region
uuaugcauauauaaguuua

SEQ ID NO: 243 - RNA, 19 nt, Artificial Sequence
  Description of Artificial Sequence:  Target Sequence/siNA sense region
acaccuuuaucuuuccaug

SEQ ID NO: 244 - RNA, 19 nt, Artificial Sequence
  Description of Artificial Sequence:  Target Sequence/siNA sense region
gggagccagcugcuuuuug

SEQ ID NO: 245 - RNA, 19 nt, Artificial Sequence
  Description of Artificial Sequence:  Target Sequence/siNA sense region
gugauuuuuuuaauagugc

SEQ ID NO: 246 - RNA, 19 nt, Artificial Sequence
  Description of Artificial Sequence:  Target Sequence/siNA sense region
cuuuuuuuuuuugacuaac

SEQ ID NO: 247 - RNA, 19 nt, Artificial Sequence
  Description of Artificial Sequence:  Target Sequence/siNA sense region
caagaauguaacuccagau

SEQ ID NO: 248 - RNA, 19 nt, Artificial Sequence
  Description of Artificial Sequence:  Target Sequence/siNA sense region
uagagaaauagugacaagu

SEQ ID NO: 249 - RNA, 19 nt, Artificial Sequence
  Description of Artificial Sequence:  Target Sequence/siNA sense region
ugaagaacacuacugcuaa

SEQ ID NO: 250 - RNA, 19 nt, Artificial Sequence
  Description of Artificial Sequence:  Target Sequence/siNA sense region
aauccucauguuacucagu

SEQ ID NO: 251 - RNA, 19 nt, Artificial Sequence
  Description of Artificial Sequence:  Target Sequence/siNA sense region
uguuagagaaauccuuccu

SEQ ID NO: 252 - RNA, 19 nt, Artificial Sequence
  Description of Artificial Sequence:  Target Sequence/siNA sense region
uaaacccaaugacuucccu

SEQ ID NO: 253 - RNA, 19 nt, Artificial Sequence
  Description of Artificial Sequence:  Target Sequence/siNA sense region
ugcuccaacccccgccacc

SEQ ID NO: 254 - RNA, 19 nt, Artificial Sequence
  Description of Artificial Sequence:  Target Sequence/siNA sense region
cucagggcacgcaggacca

SEQ ID NO: 255 - RNA, 19 nt, Artificial Sequence
  Description of Artificial Sequence:  Target Sequence/siNA sense region
aguuugauugaggagcugc

SEQ ID NO: 256 - RNA, 19 nt, Artificial Sequence
  Description of Artificial Sequence:  Target Sequence/siNA sense region
cacugaucacccaaugcau

SEQ ID NO: 257 - RNA, 19 nt, Artificial Sequence
  Description of Artificial Sequence:  Target Sequence/siNA sense region
ucacguaccccacugggcc

SEQ ID NO: 258 - RNA, 19 nt, Artificial Sequence
  Description of Artificial Sequence:  Target Sequence/siNA sense region
cagcccugcagcccaaaac

SEQ ID NO: 259 - RNA, 19 nt, Artificial Sequence
  Description of Artificial Sequence:  Target Sequence/siNA sense region
cccagggcaacaagcccgu

SEQ ID NO: 260 - RNA, 19 nt, Artificial Sequence
  Description of Artificial Sequence:  Target Sequence/siNA sense region
uuagccccaggggaucacu

SEQ ID NO: 261 - RNA, 19 nt, Artificial Sequence
  Description of Artificial Sequence:  Target Sequence/siNA sense region
uggcuggccugagcaacau

SEQ ID NO: 262 - RNA, 19 nt, Artificial Sequence
  Description of Artificial Sequence:  Target Sequence/siNA sense region
ucucgggaguccucuagca

SEQ ID NO: 263 - RNA, 19 nt, Artificial Sequence
  Description of Artificial Sequence:  Target Sequence/siNA sense region
aggccuaagacaugugagg

SEQ ID NO: 264 - RNA, 19 nt, Artificial Sequence
  Description of Artificial Sequence:  Target Sequence/siNA sense region
gaggaaaaggaaaaaaagc

SEQ ID NO: 265 - RNA, 19 nt, Artificial Sequence
  Description of Artificial Sequence:  Target Sequence/siNA sense region
caaaaagcaagggagaaaa

SEQ ID NO: 266 - RNA, 19 nt, Artificial Sequence
  Description of Artificial Sequence:  Target Sequence/siNA sense region
agagaaaccgggagaaggc

SEQ ID NO: 267 - RNA, 19 nt, Artificial Sequence
  Description of Artificial Sequence:  Target Sequence/siNA sense region
caugagaaagaauuugaga

SEQ ID NO: 268 - RNA, 19 nt, Artificial Sequence
  Description of Artificial Sequence:  Target Sequence/siNA sense region
acgcaccaugugggcacgg

SEQ ID NO: 269 - RNA, 19 nt, Artificial Sequence
  Description of Artificial Sequence:  Target Sequence/siNA sense region
gagggggacggggcucagc

SEQ ID NO: 270 - RNA, 19 nt, Artificial Sequence
  Description of Artificial Sequence:  Target Sequence/siNA sense region
caaugccauuucaguggcu

SEQ ID NO: 271 - RNA, 19 nt, Artificial Sequence
  Description of Artificial Sequence:  Target Sequence/siNA sense region
uucccagcucugacccuuc

SEQ ID NO: 272 - RNA, 19 nt, Artificial Sequence
  Description of Artificial Sequence:  Target Sequence/siNA sense region
cuacauuugagggcccagc

SEQ ID NO: 273 - RNA, 19 nt, Artificial Sequence
  Description of Artificial Sequence:  Target Sequence/siNA sense region
ccaggagcagauggacagc

SEQ ID NO: 274 - RNA, 19 nt, Artificial Sequence
  Description of Artificial Sequence:  Target Sequence/siNA sense region
cgaugaggggacauuuucu

SEQ ID NO: 275 - RNA, 19 nt, Artificial Sequence
  Description of Artificial Sequence:  Target Sequence/siNA sense region
uggauucugggaggcaaga

SEQ ID NO: 276 - RNA, 19 nt, Artificial Sequence
  Description of Artificial Sequence:  Target Sequence/siNA sense region
aaaaggacaaauaucuuuu

SEQ ID NO: 277 - RNA, 19 nt, Artificial Sequence
  Description of Artificial Sequence:  Target Sequence/siNA sense region
uuuggaacuaaagcaaauu

SEQ ID NO: 278 - RNA, 19 nt, Artificial Sequence
  Description of Artificial Sequence:  Target Sequence/siNA sense region
uuuagaccuuuaccuaugg

SEQ ID NO: 279 - RNA, 19 nt, Artificial Sequence
  Description of Artificial Sequence:  Target Sequence/siNA sense region
gaagugguucuauguccau

SEQ ID NO: 280 - RNA, 19 nt, Artificial Sequence
  Description of Artificial Sequence:  Target Sequence/siNA sense region
uucucauucguggcauguu

SEQ ID NO: 281 - RNA, 19 nt, Artificial Sequence
  Description of Artificial Sequence:  Target Sequence/siNA sense region
uuugauuuguagcacugag

SEQ ID NO: 282 - RNA, 19 nt, Artificial Sequence
  Description of Artificial Sequence:  Target Sequence/siNA sense region
ggguggcacucaacucuga

SEQ ID NO: 283 - RNA, 19 nt, Artificial Sequence
  Description of Artificial Sequence:  Target Sequence/siNA sense region
agcccauacuuuuggcucc

SEQ ID NO: 284 - RNA, 19 nt, Artificial Sequence
  Description of Artificial Sequence:  Target Sequence/siNA sense region
cucuaguaagaugcacuga

SEQ ID NO: 285 - RNA, 19 nt, Artificial Sequence
  Description of Artificial Sequence:  Target Sequence/siNA sense region
aaaacuuagccagaguuag

SEQ ID NO: 286 - RNA, 19 nt, Artificial Sequence
  Description of Artificial Sequence:  Target Sequence/siNA sense region
gguugucuccaggccauga

SEQ ID NO: 287 - RNA, 19 nt, Artificial Sequence
  Description of Artificial Sequence:  Target Sequence/siNA sense region
auggccuuacacugaaaau

SEQ ID NO: 288 - RNA, 19 nt, Artificial Sequence
  Description of Artificial Sequence:  Target Sequence/siNA sense region
ugucacauucuauuuuggg

SEQ ID NO: 289 - RNA, 19 nt, Artificial Sequence
  Description of Artificial Sequence:  Target Sequence/siNA sense region
guauuaauauauaguccag

SEQ ID NO: 290 - RNA, 19 nt, Artificial Sequence
  Description of Artificial Sequence:  Target Sequence/siNA sense region
gacacuuaacucaauuucu

SEQ ID NO: 291 - RNA, 19 nt, Artificial Sequence
  Description of Artificial Sequence:  Target Sequence/siNA sense region
uugguauuauucuguuuug

SEQ ID NO: 292 - RNA, 19 nt, Artificial Sequence
  Description of Artificial Sequence:  Target Sequence/siNA sense region
gcacaguuaguugugaaag

SEQ ID NO: 293 - RNA, 19 nt, Artificial Sequence
  Description of Artificial Sequence:  Target Sequence/siNA sense region
gaaagcugagaagaaugaa

SEQ ID NO: 294 - RNA, 19 nt, Artificial Sequence
  Description of Artificial Sequence:  Target Sequence/siNA sense region
aaaugcaguccugaggaga

SEQ ID NO: 295 - RNA, 19 nt, Artificial Sequence
  Description of Artificial Sequence:  Target Sequence/siNA sense region
aguuuucuccauaucaaaa

SEQ ID NO: 296 - RNA, 19 nt, Artificial Sequence
  Description of Artificial Sequence:  Target Sequence/siNA sense region
acgagggcugauggaggaa

SEQ ID NO: 297 - RNA, 19 nt, Artificial Sequence
  Description of Artificial Sequence:  Target Sequence/siNA sense region
aaaaggucaauaaggucaa

SEQ ID NO: 298 - RNA, 19 nt, Artificial Sequence
  Description of Artificial Sequence:  Target Sequence/siNA sense region
agggaagaccccgucucua

SEQ ID NO: 299 - RNA, 19 nt, Artificial Sequence
  Description of Artificial Sequence:  Target Sequence/siNA sense region
auaccaaccaaaccaauuc

SEQ ID NO: 300 - RNA, 19 nt, Artificial Sequence
  Description of Artificial Sequence:  Target Sequence/siNA sense region
caccaacacaguugggacc

SEQ ID NO: 301 - RNA, 19 nt, Artificial Sequence
  Description of Artificial Sequence:  Target Sequence/siNA sense region
ccaaaacacaggaagucag

SEQ ID NO: 302 - RNA, 19 nt, Artificial Sequence
  Description of Artificial Sequence:  Target Sequence/siNA sense region
gucacguuuccuuuucauu

SEQ ID NO: 303 - RNA, 19 nt, Artificial Sequence
  Description of Artificial Sequence:  Target Sequence/siNA sense region
uuaauggggauuccacuau

SEQ ID NO: 304 - RNA, 19 nt, Artificial Sequence
  Description of Artificial Sequence:  Target Sequence/siNA sense region
ucucacacuaaucugaaag

SEQ ID NO: 305 - RNA, 19 nt, Artificial Sequence
  Description of Artificial Sequence:  Target Sequence/siNA sense region
ggauguggaagagcauuag

SEQ ID NO: 306 - RNA, 19 nt, Artificial Sequence
  Description of Artificial Sequence:  Target Sequence/siNA sense region
gcuggcgcauauuaagcac

SEQ ID NO: 307 - RNA, 19 nt, Artificial Sequence
  Description of Artificial Sequence:  Target Sequence/siNA sense region
cuuuaagcuccuugaguaa

SEQ ID NO: 308 - RNA, 19 nt, Artificial Sequence
  Description of Artificial Sequence:  Target Sequence/siNA sense region
aaaaggugguauguaauuu

SEQ ID NO: 309 - RNA, 19 nt, Artificial Sequence
  Description of Artificial Sequence:  Target Sequence/siNA sense region
uaugcaagguauuucucca

SEQ ID NO: 310 - RNA, 19 nt, Artificial Sequence
  Description of Artificial Sequence:  Target Sequence/siNA sense region
aguugggacucaggauauu

SEQ ID NO: 311 - RNA, 19 nt, Artificial Sequence
  Description of Artificial Sequence:  Target Sequence/siNA sense region
uaguuaaugagccaucacu

SEQ ID NO: 312 - RNA, 19 nt, Artificial Sequence
  Description of Artificial Sequence:  Target Sequence/siNA sense region
uagaagaaaagcccauuuu

SEQ ID NO: 313 - RNA, 19 nt, Artificial Sequence
  Description of Artificial Sequence:  Target Sequence/siNA sense region
ucaacugcuuugaaacuug

SEQ ID NO: 314 - RNA, 19 nt, Artificial Sequence
  Description of Artificial Sequence:  Target Sequence/siNA sense region
gccuggggucugagcauga

SEQ ID NO: 315 - RNA, 19 nt, Artificial Sequence
  Description of Artificial Sequence:  Target Sequence/siNA sense region
augggaauagggagacagg

SEQ ID NO: 316 - RNA, 19 nt, Artificial Sequence
  Description of Artificial Sequence:  Target Sequence/siNA sense region
gguaggaaagggcgccuac

SEQ ID NO: 317 - RNA, 19 nt, Artificial Sequence
  Description of Artificial Sequence:  Target Sequence/siNA sense region
cucuucagggucuaaagau

SEQ ID NO: 318 - RNA, 19 nt, Artificial Sequence
  Description of Artificial Sequence:  Target Sequence/siNA sense region
ucaagugggccuuggaucg

SEQ ID NO: 319 - RNA, 19 nt, Artificial Sequence
  Description of Artificial Sequence:  Target Sequence/siNA sense region
gcuaagcuggcucuguuug

SEQ ID NO: 320 - RNA, 19 nt, Artificial Sequence
  Description of Artificial Sequence:  Target Sequence/siNA sense region
gaugcuauuuaugcaaguu

SEQ ID NO: 321 - RNA, 19 nt, Artificial Sequence
  Description of Artificial Sequence:  Target Sequence/siNA sense region
uagggucuauguauuuagg

SEQ ID NO: 322 - RNA, 19 nt, Artificial Sequence
  Description of Artificial Sequence:  Target Sequence/siNA sense region
gaugcgccuacucuucagg

SEQ ID NO: 323 - RNA, 19 nt, Artificial Sequence
  Description of Artificial Sequence:  Target Sequence/siNA sense region
ggucuaaagaucaaguggg

SEQ ID NO: 324 - RNA, 19 nt, Artificial Sequence
  Description of Artificial Sequence:  Target Sequence/siNA sense region
gccuuggaucgcuaagcug

SEQ ID NO: 325 - RNA, 19 nt, Artificial Sequence
  Description of Artificial Sequence:  Target Sequence/siNA sense region
ggcucuguuugaugcuauu

SEQ ID NO: 326 - RNA, 19 nt, Artificial Sequence
  Description of Artificial Sequence:  Target Sequence/siNA sense region
uuaugcaaguuagggucua

SEQ ID NO: 327 - RNA, 19 nt, Artificial Sequence
  Description of Artificial Sequence:  Target Sequence/siNA sense region
auguauuuaggaugucugc

SEQ ID NO: 328 - RNA, 19 nt, Artificial Sequence
  Description of Artificial Sequence:  Target Sequence/siNA sense region
caccuucugcagccaguca

SEQ ID NO: 329 - RNA, 19 nt, Artificial Sequence
  Description of Artificial Sequence:  Target Sequence/siNA sense region
agaagcuggagaggcaaca

SEQ ID NO: 330 - RNA, 19 nt, Artificial Sequence
  Description of Artificial Sequence:  Target Sequence/siNA sense region
aguggauugcugcuucuug

SEQ ID NO: 331 - RNA, 19 nt, Artificial Sequence
  Description of Artificial Sequence:  Target Sequence/siNA sense region
ggggagaagaguaugcuuc

SEQ ID NO: 332 - RNA, 19 nt, Artificial Sequence
  Description of Artificial Sequence:  Target Sequence/siNA sense region
ccuuuuauccauguaauuu

SEQ ID NO: 333 - RNA, 19 nt, Artificial Sequence
  Description of Artificial Sequence:  Target Sequence/siNA sense region
uaacuguagaaccugagcu

SEQ ID NO: 334 - RNA, 19 nt, Artificial Sequence
  Description of Artificial Sequence:  Target Sequence/siNA sense region
ucuaaguaaccgaagaaug

SEQ ID NO: 335 - RNA, 19 nt, Artificial Sequence
  Description of Artificial Sequence:  Target Sequence/siNA sense region
guaugccucuguucuuaug

SEQ ID NO: 336 - RNA, 19 nt, Artificial Sequence
  Description of Artificial Sequence:  Target Sequence/siNA sense region
gugccacauccuuguuuaa

SEQ ID NO: 337 - RNA, 19 nt, Artificial Sequence
  Description of Artificial Sequence:  Target Sequence/siNA sense region
aaggcucucuguaugaaga

SEQ ID NO: 338 - RNA, 19 nt, Artificial Sequence
  Description of Artificial Sequence:  Target Sequence/siNA sense region
agaugggaccgucaucagc

SEQ ID NO: 339 - RNA, 19 nt, Artificial Sequence
  Description of Artificial Sequence:  Target Sequence/siNA sense region
cacauucccuagugagccu

SEQ ID NO: 340 - RNA, 19 nt, Artificial Sequence
  Description of Artificial Sequence:  Target Sequence/siNA sense region
uacuggcuccuggcagcgg

SEQ ID NO: 341 - RNA, 19 nt, Artificial Sequence
  Description of Artificial Sequence:  Target Sequence/siNA sense region
gcuuuuguggaagacucac

SEQ ID NO: 342 - RNA, 19 nt, Artificial Sequence
  Description of Artificial Sequence:  Target Sequence/siNA sense region
cuagccagaagagaggagu

SEQ ID NO: 343 - RNA, 19 nt, Artificial Sequence
  Description of Artificial Sequence:  Target Sequence/siNA sense region
ugggacaguccucuccacc

SEQ ID NO: 344 - RNA, 19 nt, Artificial Sequence
  Description of Artificial Sequence:  Target Sequence/siNA sense region
caagaucuaaauccaaaca

SEQ ID NO: 345 - RNA, 19 nt, Artificial Sequence
  Description of Artificial Sequence:  Target Sequence/siNA sense region
aaaagcaggcuagagccag

SEQ ID NO: 346 - RNA, 19 nt, Artificial Sequence
  Description of Artificial Sequence:  Target Sequence/siNA sense region
gaagagaggacaaaucuuu

SEQ ID NO: 347 - RNA, 19 nt, Artificial Sequence
  Description of Artificial Sequence:  Target Sequence/siNA sense region
uguuguuccucuucuuuac

SEQ ID NO: 348 - RNA, 19 nt, Artificial Sequence
  Description of Artificial Sequence:  Target Sequence/siNA sense region
cacauacgcaaaccaccug

SEQ ID NO: 349 - RNA, 19 nt, Artificial Sequence
  Description of Artificial Sequence:  Target Sequence/siNA sense region
gugacagcuggcaauuuua

SEQ ID NO: 350 - RNA, 19 nt, Artificial Sequence
  Description of Artificial Sequence:  Target Sequence/siNA sense region
auaaaucagguaacuggaa

SEQ ID NO: 351 - RNA, 19 nt, Artificial Sequence
  Description of Artificial Sequence:  Target Sequence/siNA sense region
aggagguuaaacucagaaa

SEQ ID NO: 352 - RNA, 19 nt, Artificial Sequence
  Description of Artificial Sequence:  Target Sequence/siNA sense region
aaaagaagaccucagucaa

SEQ ID NO: 353 - RNA, 19 nt, Artificial Sequence
  Description of Artificial Sequence:  Target Sequence/siNA sense region
auucucuacuuuuuuuuuu

SEQ ID NO: 354 - RNA, 19 nt, Artificial Sequence
  Description of Artificial Sequence:  Target Sequence/siNA sense region
uuuuuuuccaaaucagaua

SEQ ID NO: 355 - RNA, 19 nt, Artificial Sequence
  Description of Artificial Sequence:  Target Sequence/siNA sense region
aauagcccagcaaauagug

SEQ ID NO: 356 - RNA, 19 nt, Artificial Sequence
  Description of Artificial Sequence:  Target Sequence/siNA sense region
gauaacaaauaaaaccuua

SEQ ID NO: 357 - RNA, 19 nt, Artificial Sequence
  Description of Artificial Sequence:  Target Sequence/siNA sense region
agcuguucaugucuugauu

SEQ ID NO: 358 - RNA, 19 nt, Artificial Sequence
  Description of Artificial Sequence:  Target Sequence/siNA sense region
uucaauaauuaauucuuaa

SEQ ID NO: 359 - RNA, 19 nt, Artificial Sequence
  Description of Artificial Sequence:  Target Sequence/siNA sense region
aucauuaagagaccauaau

SEQ ID NO: 360 - RNA, 19 nt, Artificial Sequence
  Description of Artificial Sequence:  Target Sequence/siNA sense region
uaaauacuccuuuucaaga

SEQ ID NO: 361 - RNA, 19 nt, Artificial Sequence
  Description of Artificial Sequence:  Target Sequence/siNA sense region
agaaaagcaaaaccauuag

SEQ ID NO: 362 - RNA, 19 nt, Artificial Sequence
  Description of Artificial Sequence:  Target Sequence/siNA sense region
gaauuguuacucagcuccu

SEQ ID NO: 363 - RNA, 19 nt, Artificial Sequence
  Description of Artificial Sequence:  Target Sequence/siNA sense region
uucaaacucagguuuguag

SEQ ID NO: 364 - RNA, 19 nt, Artificial Sequence
  Description of Artificial Sequence:  Target Sequence/siNA sense region
gcauacaugaguccaucca

SEQ ID NO: 365 - RNA, 19 nt, Artificial Sequence
  Description of Artificial Sequence:  Target Sequence/siNA sense region
aucagucaaagaaugguuc

SEQ ID NO: 366 - RNA, 19 nt, Artificial Sequence
  Description of Artificial Sequence:  Target Sequence/siNA sense region
ccaucuggagucuuaaugu

SEQ ID NO: 367 - RNA, 19 nt, Artificial Sequence
  Description of Artificial Sequence:  Target Sequence/siNA sense region
uagaaagaaaaauggagac

SEQ ID NO: 368 - RNA, 19 nt, Artificial Sequence
  Description of Artificial Sequence:  Target Sequence/siNA sense region
cuuguaauaaugagcuagu

SEQ ID NO: 369 - RNA, 19 nt, Artificial Sequence
  Description of Artificial Sequence:  Target Sequence/siNA sense region
uuacaaagugcuuguucau

SEQ ID NO: 370 - RNA, 19 nt, Artificial Sequence
  Description of Artificial Sequence:  Target Sequence/siNA sense region
uuaaaauagcacugaaaau

SEQ ID NO: 371 - RNA, 19 nt, Artificial Sequence
  Description of Artificial Sequence:  Target Sequence/siNA sense region
uugaaacaugaauuaacug

SEQ ID NO: 372 - RNA, 19 nt, Artificial Sequence
  Description of Artificial Sequence:  Target Sequence/siNA sense region
gauaauauuccaaucauuu

SEQ ID NO: 373 - RNA, 19 nt, Artificial Sequence
  Description of Artificial Sequence:  Target Sequence/siNA sense region
ugccauuuaugacaaaaau

SEQ ID NO: 374 - RNA, 19 nt, Artificial Sequence
  Description of Artificial Sequence:  Target Sequence/siNA sense region
ugguuggcacuaacaaaga

SEQ ID NO: 375 - RNA, 19 nt, Artificial Sequence
  Description of Artificial Sequence:  Target Sequence/siNA sense region
aacgagcacuuccuuucag

SEQ ID NO: 376 - RNA, 19 nt, Artificial Sequence
  Description of Artificial Sequence:  Target Sequence/siNA sense region
gaguuucugagauaaugua

SEQ ID NO: 377 - RNA, 19 nt, Artificial Sequence
  Description of Artificial Sequence:  Target Sequence/siNA sense region
acguggaacagucugggug

SEQ ID NO: 378 - RNA, 19 nt, Artificial Sequence
  Description of Artificial Sequence:  Target Sequence/siNA sense region
ggaauggggcugaaaccau

SEQ ID NO: 379 - RNA, 19 nt, Artificial Sequence
  Description of Artificial Sequence:  Target Sequence/siNA sense region
ugugcaagucugugucuug

SEQ ID NO: 380 - RNA, 19 nt, Artificial Sequence
  Description of Artificial Sequence:  Target Sequence/siNA sense region
gucaguccaagaagugaca

SEQ ID NO: 381 - RNA, 19 nt, Artificial Sequence
  Description of Artificial Sequence:  Target Sequence/siNA sense region
accgagauguuaauuuuag

SEQ ID NO: 382 - RNA, 19 nt, Artificial Sequence
  Description of Artificial Sequence:  Target Sequence/siNA sense region
gggacccgugccuuguuuc

SEQ ID NO: 383 - RNA, 19 nt, Artificial Sequence
  Description of Artificial Sequence:  Target Sequence/siNA sense region
ccuagcccacaagaaugca

SEQ ID NO: 384 - RNA, 19 nt, Artificial Sequence
  Description of Artificial Sequence:  Target Sequence/siNA sense region
aaacaucaaacagauacuc

SEQ ID NO: 385 - RNA, 19 nt, Artificial Sequence
  Description of Artificial Sequence:  Target Sequence/siNA sense region
cgcuagccucauuuaaauu

SEQ ID NO: 386 - RNA, 19 nt, Artificial Sequence
  Description of Artificial Sequence:  Target Sequence/siNA sense region
ugauuaaaggaggagugca

SEQ ID NO: 387 - RNA, 19 nt, Artificial Sequence
  Description of Artificial Sequence:  Target Sequence/siNA sense region
aucuuuggccgacaguggu

SEQ ID NO: 388 - RNA, 19 nt, Artificial Sequence
  Description of Artificial Sequence:  Target Sequence/siNA sense region
uguaacugugugugugugu

SEQ ID NO: 389 - RNA, 19 nt, Artificial Sequence
  Description of Artificial Sequence:  Target Sequence/siNA sense region
ugugugugugugugugugu

SEQ ID NO: 390 - RNA, 19 nt, Artificial Sequence
  Description of Artificial Sequence:  Target Sequence/siNA sense region
ugugugugugugggugugg

SEQ ID NO: 391 - RNA, 19 nt, Artificial Sequence
  Description of Artificial Sequence:  Target Sequence/siNA sense region
gguguauguguguuuugug

SEQ ID NO: 392 - RNA, 19 nt, Artificial Sequence
  Description of Artificial Sequence:  Target Sequence/siNA sense region
gcauaacuauuuaaggaaa

SEQ ID NO: 393 - RNA, 19 nt, Artificial Sequence
  Description of Artificial Sequence:  Target Sequence/siNA sense region
acuggaauuuuaaaguuac

SEQ ID NO: 394 - RNA, 19 nt, Artificial Sequence
  Description of Artificial Sequence:  Target Sequence/siNA sense region
cuuuuauacaaaccaagaa

SEQ ID NO: 395 - RNA, 19 nt, Artificial Sequence
  Description of Artificial Sequence:  Target Sequence/siNA sense region
auauaugcuacagauauaa

SEQ ID NO: 396 - RNA, 19 nt, Artificial Sequence
  Description of Artificial Sequence:  Target Sequence/siNA sense region
agacagacaugguuugguc

SEQ ID NO: 397 - RNA, 19 nt, Artificial Sequence
  Description of Artificial Sequence:  Target Sequence/siNA sense region
ccuauauuucuagucauga

SEQ ID NO: 398 - RNA, 19 nt, Artificial Sequence
  Description of Artificial Sequence:  Target Sequence/siNA sense region
augaauguauuuuguauac

SEQ ID NO: 399 - RNA, 19 nt, Artificial Sequence
  Description of Artificial Sequence:  Target Sequence/siNA sense region
ccaucuucauauaauauac

SEQ ID NO: 400 - RNA, 19 nt, Artificial Sequence
  Description of Artificial Sequence:  Target Sequence/siNA sense region
cuuaaaaauauuucuuaau

SEQ ID NO: 401 - RNA, 19 nt, Artificial Sequence
  Description of Artificial Sequence:  Target Sequence/siNA sense region
uugggauuuguaaucguac

SEQ ID NO: 402 - RNA, 19 nt, Artificial Sequence
  Description of Artificial Sequence:  Target Sequence/siNA sense region
ccaacuuaauugauaaacu

SEQ ID NO: 403 - RNA, 19 nt, Artificial Sequence
  Description of Artificial Sequence:  Target Sequence/siNA sense region
uuggcaacugcuuuuaugu

SEQ ID NO: 404 - RNA, 19 nt, Artificial Sequence
  Description of Artificial Sequence:  Target Sequence/siNA sense region
uucugucuccuuccauaaa

SEQ ID NO: 405 - RNA, 19 nt, Artificial Sequence
  Description of Artificial Sequence:  Target Sequence/siNA sense region
auuuuucaaaauacuaauu

SEQ ID NO: 406 - RNA, 19 nt, Artificial Sequence
  Description of Artificial Sequence:  Target Sequence/siNA sense region
ucaacaaagaaaaagcucu

SEQ ID NO: 407 - RNA, 19 nt, Artificial Sequence
  Description of Artificial Sequence:  Target Sequence/siNA sense region
uuuuuuuuccuaaaauaaa

SEQ ID NO: 408 - RNA, 19 nt, Artificial Sequence
  Description of Artificial Sequence:  Target Sequence/siNA sense region
acucaaauuuauccuuguu

SEQ ID NO: 409 - RNA, 19 nt, Artificial Sequence
  Description of Artificial Sequence:  Target Sequence/siNA sense region
uuagagcagagaaaaauua

SEQ ID NO: 410 - RNA, 19 nt, Artificial Sequence
  Description of Artificial Sequence:  Target Sequence/siNA sense region
aagaaaaacuuugaaaugg

SEQ ID NO: 411 - RNA, 19 nt, Artificial Sequence
  Description of Artificial Sequence:  Target Sequence/siNA sense region
gucucaaaaaauugcuaaa

SEQ ID NO: 412 - RNA, 19 nt, Artificial Sequence
  Description of Artificial Sequence:  Target Sequence/siNA sense region
auauuuucaauggaaaacu

SEQ ID NO: 413 - RNA, 19 nt, Artificial Sequence
  Description of Artificial Sequence:  Target Sequence/siNA sense region
uaaauguuaguuuagcuga

SEQ ID NO: 414 - RNA, 19 nt, Artificial Sequence
  Description of Artificial Sequence:  Target Sequence/siNA sense region
auuguaugggguuuucgaa

SEQ ID NO: 415 - RNA, 19 nt, Artificial Sequence
  Description of Artificial Sequence:  Target Sequence/siNA sense region
accuuucacuuuuuguuug

SEQ ID NO: 416 - RNA, 19 nt, Artificial Sequence
  Description of Artificial Sequence:  Target Sequence/siNA sense region
guuuuaccuauuucacaac

SEQ ID NO: 417 - RNA, 19 nt, Artificial Sequence
  Description of Artificial Sequence:  Target Sequence/siNA sense region
cuguguaaauugccaauaa

SEQ ID NO: 418 - RNA, 19 nt, Artificial Sequence
  Description of Artificial Sequence:  Target Sequence/siNA sense region
auuccuguccaugaaaaug

SEQ ID NO: 419 - RNA, 19 nt, Artificial Sequence
  Description of Artificial Sequence:  Target Sequence/siNA sense region
gcaaauuauccaguguaga

SEQ ID NO: 420 - RNA, 19 nt, Artificial Sequence
  Description of Artificial Sequence:  Target Sequence/siNA sense region
auauauuugaccaucaccc

SEQ ID NO: 421 - RNA, 19 nt, Artificial Sequence
  Description of Artificial Sequence:  Target Sequence/siNA sense region
cuauggauauuggcuaguu

SEQ ID NO: 422 - RNA, 19 nt, Artificial Sequence
  Description of Artificial Sequence:  Target Sequence/siNA sense region
uuugccuuuauuaagcaaa

SEQ ID NO: 423 - RNA, 19 nt, Artificial Sequence
  Description of Artificial Sequence:  Target Sequence/siNA sense region
auucauuucagccugaaug

SEQ ID NO: 424 - RNA, 19 nt, Artificial Sequence
  Description of Artificial Sequence:  Target Sequence/siNA sense region
gucugccuauauauucucu

SEQ ID NO: 425 - RNA, 19 nt, Artificial Sequence
  Description of Artificial Sequence:  Target Sequence/siNA sense region
ugcucuuuguauucuccuu

SEQ ID NO: 426 - RNA, 19 nt, Artificial Sequence
  Description of Artificial Sequence:  Target Sequence/siNA sense region
uugaacccguuaaaacauc

SEQ ID NO: 427 - RNA, 19 nt, Artificial Sequence
  Description of Artificial Sequence:  Target Sequence/siNA sense region
aaaacauccuguggcacuc

SEQ ID NO: 428 - RNA, 19 nt, Artificial Sequence
  Description of Artificial Sequence:  siNA antisense region
agccgagaggaguguccgc

SEQ ID NO: 429 - RNA, 19 nt, Artificial Sequence
  Description of Artificial Sequence:  siNA antisense region
ccgccgcugccggggagga

SEQ ID NO: 430 - RNA, 19 nt, Artificial Sequence
  Description of Artificial Sequence:  siNA antisense region
ggagcccgcuccgagccgc

SEQ ID NO: 431 - RNA, 19 nt, Artificial Sequence
  Description of Artificial Sequence:  siNA antisense region
ccgcugcacccgagccccg

SEQ ID NO: 432 - RNA, 19 nt, Artificial Sequence
  Description of Artificial Sequence:  siNA antisense region
cgccgccaggcccgcuggc

SEQ ID NO: 433 - RNA, 19 nt, Artificial Sequence
  Description of Artificial Sequence:  siNA antisense region
acuuccccggguaauccuc

SEQ ID NO: 434 - RNA, 19 nt, Artificial Sequence
  Description of Artificial Sequence:  siNA antisense region
uccagccaggagacaacca

SEQ ID NO: 435 - RNA, 19 nt, Artificial Sequence
  Description of Artificial Sequence:  siNA antisense region
gagcgcccgucucgcggcu

SEQ ID NO: 436 - RNA, 19 nt, Artificial Sequence
  Description of Artificial Sequence:  siNA antisense region
ccgccggccccgcgcccug

SEQ ID NO: 437 - RNA, 19 nt, Artificial Sequence
  Description of Artificial Sequence:  siNA antisense region
ccguccucucguucgccgc

SEQ ID NO: 438 - RNA, 19 nt, Artificial Sequence
  Description of Artificial Sequence:  siNA antisense region
cgacccggccgccagaguc

SEQ ID NO: 439 - RNA, 19 nt, Artificial Sequence
  Description of Artificial Sequence:  siNA antisense region
ccgcgcucccccggccaac

SEQ ID NO: 440 - RNA, 19 nt, Artificial Sequence
  Description of Artificial Sequence:  siNA antisense region
ggccugcucgcccggugcc

SEQ ID NO: 441 - RNA, 19 nt, Artificial Sequence
  Description of Artificial Sequence:  siNA antisense region
ccauggugagcgcgacgcg

SEQ ID NO: 442 - RNA, 19 nt, Artificial Sequence
  Description of Artificial Sequence:  siNA antisense region
cggugucccaguagcugac

SEQ ID NO: 443 - RNA, 19 nt, Artificial Sequence
  Description of Artificial Sequence:  siNA antisense region
gcgcgcacagcaggacccc

SEQ ID NO: 444 - RNA, 19 nt, Artificial Sequence
  Description of Artificial Sequence:  siNA antisense region
gaagcagacagcugagcag

SEQ ID NO: 445 - RNA, 19 nt, Artificial Sequence
  Description of Artificial Sequence:  siNA antisense region
cugaacuagauccugugag

SEQ ID NO: 446 - RNA, 19 nt, Artificial Sequence
  Description of Artificial Sequence:  siNA antisense region
gaucuuuuaauuuugaacc

SEQ ID NO: 447 - RNA, 19 nt, Artificial Sequence
  Description of Artificial Sequence:  siNA antisense region
cuuuuaaacucaguucagg

SEQ ID NO: 448 - RNA, 19 nt, Artificial Sequence
  Description of Artificial Sequence:  siNA antisense region
gcaugaugugcugggugcc

SEQ ID NO: 449 - RNA, 19 nt, Artificial Sequence
  Description of Artificial Sequence:  siNA antisense region
gcagugucuggccugcuug

SEQ ID NO: 450 - RNA, 19 nt, Artificial Sequence
  Description of Artificial Sequence:  siNA antisense region
ccccccugcauuggagaug

SEQ ID NO: 451 - RNA, 19 nt, Artificial Sequence
  Description of Artificial Sequence:  siNA antisense region
accauuuaugggcugcuuc

SEQ ID NO: 452 - RNA, 19 nt, Artificial Sequence
  Description of Artificial Sequence:  siNA antisense region
ucaccauuucaggcaaaga

SEQ ID NO: 453 - RNA, 19 nt, Artificial Sequence
  Description of Artificial Sequence:  siNA antisense region
gccuuucgcuuuccuuacu

SEQ ID NO: 454 - RNA, 19 nt, Artificial Sequence
  Description of Artificial Sequence:  siNA antisense region
cagauuuaguuaugcucag

SEQ ID NO: 455 - RNA, 19 nt, Artificial Sequence
  Description of Artificial Sequence:  siNA antisense region
ugccauuucuuccacaggc

SEQ ID NO: 456 - RNA, 19 nt, Artificial Sequence
  Description of Artificial Sequence:  siNA antisense region
aaguacugcagaauuguuu

SEQ ID NO: 457 - RNA, 19 nt, Artificial Sequence
  Description of Artificial Sequence:  siNA antisense region
gagcuguguucaagguuaa

SEQ ID NO: 458 - RNA, 19 nt, Artificial Sequence
  Description of Artificial Sequence:  siNA antisense region
agccagugugguuugcuug

SEQ ID NO: 459 - RNA, 19 nt, Artificial Sequence
  Description of Artificial Sequence:  siNA antisense region
gauauuugcagcuguagaa

SEQ ID NO: 460 - RNA, 19 nt, Artificial Sequence
  Description of Artificial Sequence:  siNA antisense region
uugaaguagguacagcuag

SEQ ID NO: 461 - RNA, 19 nt, Artificial Sequence
  Description of Artificial Sequence:  siNA antisense region
auucuguuuccuucuucuu

SEQ ID NO: 462 - RNA, 19 nt, Artificial Sequence
  Description of Artificial Sequence:  siNA antisense region
uaaauauauagauugcaga

SEQ ID NO: 463 - RNA, 19 nt, Artificial Sequence
  Description of Artificial Sequence:  siNA antisense region
gucuaccuguaucacuaau

SEQ ID NO: 464 - RNA, 19 nt, Artificial Sequence
  Description of Artificial Sequence:  siNA antisense region
uguacaucucuacgaaagg

SEQ ID NO: 465 - RNA, 19 nt, Artificial Sequence
  Description of Artificial Sequence:  siNA antisense region
uaauuucggggauuucacu

SEQ ID NO: 466 - RNA, 19 nt, Artificial Sequence
  Description of Artificial Sequence:  siNA antisense region
uuccuucagucauguguau

SEQ ID NO: 467 - RNA, 19 nt, Artificial Sequence
  Description of Artificial Sequence:  siNA antisense region
agggaaugacgagcucccu

SEQ ID NO: 468 - RNA, 19 nt, Artificial Sequence
  Description of Artificial Sequence:  siNA antisense region
uaggugacguaacccggca

SEQ ID NO: 469 - RNA, 19 nt, Artificial Sequence
  Description of Artificial Sequence:  siNA antisense region
uuaaaguaacagugauguu

SEQ ID NO: 470 - RNA, 19 nt, Artificial Sequence
  Description of Artificial Sequence:  siNA antisense region
ugucaaguggaaacuuuuu

SEQ ID NO: 471 - RNA, 19 nt, Artificial Sequence
  Description of Artificial Sequence:  siNA antisense region
uuccaucagggaucaaagu

SEQ ID NO: 472 - RNA, 19 nt, Artificial Sequence
  Description of Artificial Sequence:  siNA antisense region
ugucccagauuaugcguuu

SEQ ID NO: 473 - RNA, 19 nt, Artificial Sequence
  Description of Artificial Sequence:  siNA antisense region
ugaugaagcccuuucuacu

SEQ ID NO: 474 - RNA, 19 nt, Artificial Sequence
  Description of Artificial Sequence:  siNA antisense region
uguacguugcauuugauau

SEQ ID NO: 475 - RNA, 19 nt, Artificial Sequence
  Description of Artificial Sequence:  siNA antisense region
ucagaagcccuauuucuuu

SEQ ID NO: 476 - RNA, 19 nt, Artificial Sequence
  Description of Artificial Sequence:  siNA antisense region
ugacuguugcuucacaggu

SEQ ID NO: 477 - RNA, 19 nt, Artificial Sequence
  Description of Artificial Sequence:  siNA antisense region
ucuuauacaaaugcccauu

SEQ ID NO: 478 - RNA, 19 nt, Artificial Sequence
  Description of Artificial Sequence:  siNA antisense region
gaugugugagauaguuugu

SEQ ID NO: 479 - RNA, 19 nt, Artificial Sequence
  Description of Artificial Sequence:  siNA antisense region
ugauuguauugguuugucg

SEQ ID NO: 480 - RNA, 19 nt, Artificial Sequence
  Description of Artificial Sequence:  siNA antisense region
ugcuuauuuggacaucuau

SEQ ID NO: 481 - RNA, 19 nt, Artificial Sequence
  Description of Artificial Sequence:  siNA antisense region
auuugacugggcguggugu

SEQ ID NO: 482 - RNA, 19 nt, Artificial Sequence
  Description of Artificial Sequence:  siNA antisense region
gaguauggccucuaaguaa

SEQ ID NO: 483 - RNA, 19 nt, Artificial Sequence
  Description of Artificial Sequence:  siNA antisense region
caguacaauugaggacaag

SEQ ID NO: 484 - RNA, 19 nt, Artificial Sequence
  Description of Artificial Sequence:  siNA antisense region
uguucaagggagugguagc

SEQ ID NO: 485 - RNA, 19 nt, Artificial Sequence
  Description of Artificial Sequence:  siNA antisense region
aggucauuugaacucucgu

SEQ ID NO: 486 - RNA, 19 nt, Artificial Sequence
  Description of Artificial Sequence:  siNA antisense region
uuucaucaggguaacucca

SEQ ID NO: 487 - RNA, 19 nt, Artificial Sequence
  Description of Artificial Sequence:  siNA antisense region
cggaagcucucuuauuuuu

SEQ ID NO: 488 - RNA, 19 nt, Artificial Sequence
  Description of Artificial Sequence:  siNA antisense region
ggucaauucgucgccuuac

SEQ ID NO: 489 - RNA, 19 nt, Artificial Sequence
  Description of Artificial Sequence:  siNA antisense region
uggcaugggaauugcuuug

SEQ ID NO: 490 - RNA, 19 nt, Artificial Sequence
  Description of Artificial Sequence:  siNA antisense region
gaacacuguagaauauguu

SEQ ID NO: 491 - RNA, 19 nt, Artificial Sequence
  Description of Artificial Sequence:  siNA antisense region
gcauuuugucaauaguaag

SEQ ID NO: 492 - RNA, 19 nt, Artificial Sequence
  Description of Artificial Sequence:  siNA antisense region
guccuuugucuuuguucug

SEQ ID NO: 493 - RNA, 19 nt, Artificial Sequence
  Description of Artificial Sequence:  siNA antisense region
uuacacgacaaguauaaag

SEQ ID NO: 494 - RNA, 19 nt, Artificial Sequence
  Description of Artificial Sequence:  siNA antisense region
ugaaugaugguccacuccu

SEQ ID NO: 495 - RNA, 19 nt, Artificial Sequence
  Description of Artificial Sequence:  siNA antisense region
cugagguguuaacagauuu

SEQ ID NO: 496 - RNA, 19 nt, Artificial Sequence
  Description of Artificial Sequence:  siNA antisense region
cuuuaucauauauaugcac

SEQ ID NO: 497 - RNA, 19 nt, Artificial Sequence
  Description of Artificial Sequence:  siNA antisense region
guuucacagugaugaaugc

SEQ ID NO: 498 - RNA, 19 nt, Artificial Sequence
  Description of Artificial Sequence:  siNA antisense region
gcaccugcuguuuucgaug

SEQ ID NO: 499 - RNA, 19 nt, Artificial Sequence
  Description of Artificial Sequence:  siNA antisense region
ugccagcuacgguuucaag

SEQ ID NO: 500 - RNA, 19 nt, Artificial Sequence
  Description of Artificial Sequence:  siNA antisense region
agagccgguaagaccgcuu

SEQ ID NO: 501 - RNA, 19 nt, Artificial Sequence
  Description of Artificial Sequence:  siNA antisense region
augccuucacuuucauaga

SEQ ID NO: 502 - RNA, 19 nt, Artificial Sequence
  Description of Artificial Sequence:  siNA antisense region
caacuuccggcgagggaaa

SEQ ID NO: 503 - RNA, 19 nt, Artificial Sequence
  Description of Artificial Sequence:  siNA antisense region
acccaucuuuuaaccauac

SEQ ID NO: 504 - RNA, 19 nt, Artificial Sequence
  Description of Artificial Sequence:  siNA antisense region
auuucucagucgcagguaa

SEQ ID NO: 505 - RNA, 19 nt, Artificial Sequence
  Description of Artificial Sequence:  siNA antisense region
gagucaaauagcgagcaga

SEQ ID NO: 506 - RNA, 19 nt, Artificial Sequence
  Description of Artificial Sequence:  siNA antisense region
uaauuaacgaguagccacg

SEQ ID NO: 507 - RNA, 19 nt, Artificial Sequence
  Description of Artificial Sequence:  siNA antisense region
cuucaguuacguccuugau

SEQ ID NO: 508 - RNA, 19 nt, Artificial Sequence
  Description of Artificial Sequence:  siNA antisense region
uauaauucccugcauccuc

SEQ ID NO: 509 - RNA, 19 nt, Artificial Sequence
  Description of Artificial Sequence:  siNA antisense region
uuaugcucagcaagauugu

SEQ ID NO: 510 - RNA, 19 nt, Artificial Sequence
  Description of Artificial Sequence:  siNA antisense region
uaaacacauuugacuguuu

SEQ ID NO: 511 - RNA, 19 nt, Artificial Sequence
  Description of Artificial Sequence:  siNA antisense region
gaguggcagugagguuuuu

SEQ ID NO: 512 - RNA, 19 nt, Artificial Sequence
  Description of Artificial Sequence:  siNA antisense region
guuucacauugacaauuag

SEQ ID NO: 513 - RNA, 19 nt, Artificial Sequence
  Description of Artificial Sequence:  siNA antisense region
ccuuuucguaaaucugggg

SEQ ID NO: 514 - RNA, 19 nt, Artificial Sequence
  Description of Artificial Sequence:  siNA antisense region
cuggaaacgaugacacggc

SEQ ID NO: 515 - RNA, 19 nt, Artificial Sequence
  Description of Artificial Sequence:  siNA antisense region
guggguagagagccggguc

SEQ ID NO: 516 - RNA, 19 nt, Artificial Sequence
  Description of Artificial Sequence:  siNA antisense region
ggauuugucugcugcccag

SEQ ID NO: 517 - RNA, 19 nt, Artificial Sequence
  Description of Artificial Sequence:  siNA antisense region
cauaugcgguacaagucag

SEQ ID NO: 518 - RNA, 19 nt, Artificial Sequence
  Description of Artificial Sequence:  siNA antisense region
uuguagguugagggauacc

SEQ ID NO: 519 - RNA, 19 nt, Artificial Sequence
  Description of Artificial Sequence:  siNA antisense region
ggugccagaaccacuugau

SEQ ID NO: 520 - RNA, 19 nt, Artificial Sequence
  Description of Artificial Sequence:  siNA antisense region
aaugauuaugguuacaggg

SEQ ID NO: 521 - RNA, 19 nt, Artificial Sequence
  Description of Artificial Sequence:  siNA antisense region
agucacaccuugcuucgga

SEQ ID NO: 522 - RNA, 19 nt, Artificial Sequence
  Description of Artificial Sequence:  siNA antisense region
cuucauuauuggaacaaaa

SEQ ID NO: 523 - RNA, 19 nt, Artificial Sequence
  Description of Artificial Sequence:  siNA antisense region
cauccaggauaaaggacuc

SEQ ID NO: 524 - RNA, 19 nt, Artificial Sequence
  Description of Artificial Sequence:  siNA antisense region
uucccauguugcugucagc

SEQ ID NO: 525 - RNA, 19 nt, Artificial Sequence
  Description of Artificial Sequence:  siNA antisense region
ugaugcucucaauucuguu

SEQ ID NO: 526 - RNA, 19 nt, Artificial Sequence
  Description of Artificial Sequence:  siNA antisense region
uuauugccaugcgcugagu

SEQ ID NO: 527 - RNA, 19 nt, Artificial Sequence
  Description of Artificial Sequence:  siNA antisense region
ucuuauucuuuccuucuau

SEQ ID NO: 528 - RNA, 19 nt, Artificial Sequence
  Description of Artificial Sequence:  siNA antisense region
caaccaaggugcuagccau

SEQ ID NO: 529 - RNA, 19 nt, Artificial Sequence
  Description of Artificial Sequence:  siNA antisense region
aaauucuagagucagccac

SEQ ID NO: 530 - RNA, 19 nt, Artificial Sequence
  Description of Artificial Sequence:  siNA antisense region
ugcaaauguagauuccaga

SEQ ID NO: 531 - RNA, 19 nt, Artificial Sequence
  Description of Artificial Sequence:  siNA antisense region
caacuuuauuggaagcuau

SEQ ID NO: 532 - RNA, 19 nt, Artificial Sequence
  Description of Artificial Sequence:  siNA antisense region
uguuucuucccacaguccc

SEQ ID NO: 533 - RNA, 19 nt, Artificial Sequence
  Description of Artificial Sequence:  siNA antisense region
cugugauauaaaagcuuau

SEQ ID NO: 534 - RNA, 19 nt, Artificial Sequence
  Description of Artificial Sequence:  siNA antisense region
gaaacccauuuggcacauc

SEQ ID NO: 535 - RNA, 19 nt, Artificial Sequence
  Description of Artificial Sequence:  siNA antisense region
uuuuuuccaaguuaacaug

SEQ ID NO: 536 - RNA, 19 nt, Artificial Sequence
  Description of Artificial Sequence:  siNA antisense region
ccucuccuuccgucggcau

SEQ ID NO: 537 - RNA, 19 nt, Artificial Sequence
  Description of Artificial Sequence:  siNA antisense region
ugcaagacaguuucagguc

SEQ ID NO: 538 - RNA, 19 nt, Artificial Sequence
  Description of Artificial Sequence:  siNA antisense region
auaagaacuuguuaacugu

SEQ ID NO: 539 - RNA, 19 nt, Artificial Sequence
  Description of Artificial Sequence:  siNA antisense region
uccaaguaacgucucugua

SEQ ID NO: 540 - RNA, 19 nt, Artificial Sequence
  Description of Artificial Sequence:  siNA antisense region
uaacuguccgcaguaaaau

SEQ ID NO: 541 - RNA, 19 nt, Artificial Sequence
  Description of Artificial Sequence:  siNA antisense region
agugcauuguucuguuauu

SEQ ID NO: 542 - RNA, 19 nt, Artificial Sequence
  Description of Artificial Sequence:  siNA antisense region
uuugcuugcuaauacugua

SEQ ID NO: 543 - RNA, 19 nt, Artificial Sequence
  Description of Artificial Sequence:  siNA antisense region
ccuuagugauggccauuuu

SEQ ID NO: 544 - RNA, 19 nt, Artificial Sequence
  Description of Artificial Sequence:  siNA antisense region
uaagagugauggagugcuc

SEQ ID NO: 545 - RNA, 19 nt, Artificial Sequence
  Description of Artificial Sequence:  siNA antisense region
cauucaugaugguaagauu

SEQ ID NO: 546 - RNA, 19 nt, Artificial Sequence
  Description of Artificial Sequence:  siNA antisense region
cugaaucuugcagggaaac

SEQ ID NO: 547 - RNA, 19 nt, Artificial Sequence
  Description of Artificial Sequence:  siNA antisense region
cucugcaggcauaggugcc

SEQ ID NO: 548 - RNA, 19 nt, Artificial Sequence
  Description of Artificial Sequence:  siNA antisense region
cuguguauacauuccuggc

SEQ ID NO: 549 - RNA, 19 nt, Artificial Sequence
  Description of Artificial Sequence:  siNA antisense region
ucuggaggauuucuucccc

SEQ ID NO: 550 - RNA, 19 nt, Artificial Sequence
  Description of Artificial Sequence:  siNA antisense region
ugauuguaauuucuuucuu

SEQ ID NO: 551 - RNA, 19 nt, Artificial Sequence
  Description of Artificial Sequence:  siNA antisense region
auggugcuuccugaucucu

SEQ ID NO: 552 - RNA, 19 nt, Artificial Sequence
  Description of Artificial Sequence:  siNA antisense region
ugagguuucgcaggaggua

SEQ ID NO: 553 - RNA, 19 nt, Artificial Sequence
  Description of Artificial Sequence:  siNA antisense region
uggccacugugugaucacu

SEQ ID NO: 554 - RNA, 19 nt, Artificial Sequence
  Description of Artificial Sequence:  siNA antisense region
aagugguggaacugcugau

SEQ ID NO: 555 - RNA, 19 nt, Artificial Sequence
  Description of Artificial Sequence:  siNA antisense region
cauuagcaugacagucuaa

SEQ ID NO: 556 - RNA, 19 nt, Artificial Sequence
  Description of Artificial Sequence:  siNA antisense region
ucugaggcucggggacacc

SEQ ID NO: 557 - RNA, 19 nt, Artificial Sequence
  Description of Artificial Sequence:  siNA antisense region
uguuuuuaaaccaagugau

SEQ ID NO: 558 - RNA, 19 nt, Artificial Sequence
  Description of Artificial Sequence:  siNA antisense region
cuuguuguauuuugugguu

SEQ ID NO: 559 - RNA, 19 nt, Artificial Sequence
  Description of Artificial Sequence:  siNA antisense region
cuaaaauaauuccaggcuc

SEQ ID NO: 560 - RNA, 19 nt, Artificial Sequence
  Description of Artificial Sequence:  siNA antisense region
gcgugcugcuuccuggucc

SEQ ID NO: 561 - RNA, 19 nt, Artificial Sequence
  Description of Artificial Sequence:  siNA antisense region
ugacucuuucaauaaacag

SEQ ID NO: 562 - RNA, 19 nt, Artificial Sequence
  Description of Artificial Sequence:  siNA antisense region
caccuucauccucuucugu

SEQ ID NO: 563 - RNA, 19 nt, Artificial Sequence
  Description of Artificial Sequence:  siNA antisense region
uggcuuugcagugauagac

SEQ ID NO: 564 - RNA, 19 nt, Artificial Sequence
  Description of Artificial Sequence:  siNA antisense region
cagagcccuucugguuggu

SEQ ID NO: 565 - RNA, 19 nt, Artificial Sequence
  Description of Artificial Sequence:  siNA antisense region
gguaugcugaacuuuccac

SEQ ID NO: 566 - RNA, 19 nt, Artificial Sequence
  Description of Artificial Sequence:  siNA antisense region
agguuccuugaacagugag

SEQ ID NO: 567 - RNA, 19 nt, Artificial Sequence
  Description of Artificial Sequence:  siNA antisense region
ccagauuagacuuguccga

SEQ ID NO: 568 - RNA, 19 nt, Artificial Sequence
  Description of Artificial Sequence:  siNA antisense region
auguuagagugaucagcuc

SEQ ID NO: 569 - RNA, 19 nt, Artificial Sequence
  Description of Artificial Sequence:  siNA antisense region
ucgcagccacacaggugca

SEQ ID NO: 570 - RNA, 19 nt, Artificial Sequence
  Description of Artificial Sequence:  siNA antisense region
auaggagccagaagagagu

SEQ ID NO: 571 - RNA, 19 nt, Artificial Sequence
  Description of Artificial Sequence:  siNA antisense region
uucggauaaggaggguuaa

SEQ ID NO: 572 - RNA, 19 nt, Artificial Sequence
  Description of Artificial Sequence:  siNA antisense region
aagaagaccuuuucauuuu

SEQ ID NO: 573 - RNA, 19 nt, Artificial Sequence
  Description of Artificial Sequence:  siNA antisense region
agucagucuuuauuucaga

SEQ ID NO: 574 - RNA, 19 nt, Artificial Sequence
  Description of Artificial Sequence:  siNA antisense region
ccauuauaauugauaggua

SEQ ID NO: 575 - RNA, 19 nt, Artificial Sequence
  Description of Artificial Sequence:  siNA antisense region
aaggaacuucaucuggguc

SEQ ID NO: 576 - RNA, 19 nt, Artificial Sequence
  Description of Artificial Sequence:  siNA antisense region
gcucacacugcucauccaa

SEQ ID NO: 577 - RNA, 19 nt, Artificial Sequence
  Description of Artificial Sequence:  siNA antisense region
uggcaucauaagggagccg

SEQ ID NO: 578 - RNA, 19 nt, Artificial Sequence
  Description of Artificial Sequence:  siNA antisense region
gggcaaacucccacuugcu

SEQ ID NO: 579 - RNA, 19 nt, Artificial Sequence
  Description of Artificial Sequence:  siNA antisense region
ccaguuuaagucucucccg

SEQ ID NO: 580 - RNA, 19 nt, Artificial Sequence
  Description of Artificial Sequence:  siNA antisense region
cucuuccaagugauuugcc

SEQ ID NO: 581 - RNA, 19 nt, Artificial Sequence
  Description of Artificial Sequence:  siNA antisense region
ccacuuuuccaaaagcccc

SEQ ID NO: 582 - RNA, 19 nt, Artificial Sequence
  Description of Artificial Sequence:  siNA antisense region
caaaugcugaugcuugaac

SEQ ID NO: 583 - RNA, 19 nt, Artificial Sequence
  Description of Artificial Sequence:  siNA antisense region
uaggugauuucuuaaugcc

SEQ ID NO: 584 - RNA, 19 nt, Artificial Sequence
  Description of Artificial Sequence:  siNA antisense region
cagccacaguccggcacgu

SEQ ID NO: 585 - RNA, 19 nt, Artificial Sequence
  Description of Artificial Sequence:  siNA antisense region
ccucuuucagcauuuucac

SEQ ID NO: 586 - RNA, 19 nt, Artificial Sequence
  Description of Artificial Sequence:  siNA antisense region
acucgcuggccguggcccc

SEQ ID NO: 587 - RNA, 19 nt, Artificial Sequence
  Description of Artificial Sequence:  siNA antisense region
cagucaucagagcuuugua

SEQ ID NO: 588 - RNA, 19 nt, Artificial Sequence
  Description of Artificial Sequence:  siNA antisense region
gggucaagauuuuuagcuc

SEQ ID NO: 589 - RNA, 19 nt, Artificial Sequence
  Description of Artificial Sequence:  siNA antisense region
ucagaugguggccaaugug

SEQ ID NO: 590 - RNA, 19 nt, Artificial Sequence
  Description of Artificial Sequence:  siNA antisense region
ccagcagguuaaccacguu

SEQ ID NO: 591 - RNA, 19 nt, Artificial Sequence
  Description of Artificial Sequence:  siNA antisense region
cuugcuuggugcaggcucc

SEQ ID NO: 592 - RNA, 19 nt, Artificial Sequence
  Description of Artificial Sequence:  siNA antisense region
ucaccaucagaggcccucc

SEQ ID NO: 593 - RNA, 19 nt, Artificial Sequence
  Description of Artificial Sequence:  siNA antisense region
auuugcaguauucaacaau

SEQ ID NO: 594 - RNA, 19 nt, Artificial Sequence
  Description of Artificial Sequence:  siNA antisense region
aguuggagagauuuccaua

SEQ ID NO: 595 - RNA, 19 nt, Artificial Sequence
  Description of Artificial Sequence:  siNA antisense region
cacguuugcucuugaggua

SEQ ID NO: 596 - RNA, 19 nt, Artificial Sequence
  Description of Artificial Sequence:  siNA antisense region
uguugagaaaaaauaaguc

SEQ ID NO: 597 - RNA, 19 nt, Artificial Sequence
  Description of Artificial Sequence:  siNA antisense region
uguguagugcugcauccuu

SEQ ID NO: 598 - RNA, 19 nt, Artificial Sequence
  Description of Artificial Sequence:  siNA antisense region
uuucuuucuuaggcuccau

SEQ ID NO: 599 - RNA, 19 nt, Artificial Sequence
  Description of Artificial Sequence:  siNA antisense region
ccaggccuggcuccauuuu

SEQ ID NO: 600 - RNA, 19 nt, Artificial Sequence
  Description of Artificial Sequence:  siNA antisense region
uugguuucuugccuuguuc

SEQ ID NO: 601 - RNA, 19 nt, Artificial Sequence
  Description of Artificial Sequence:  siNA antisense region
uggugacgcuaucuagucu

SEQ ID NO: 602 - RNA, 19 nt, Artificial Sequence
  Description of Artificial Sequence:  siNA antisense region
ucgcaaagcuuucgcugcu

SEQ ID NO: 603 - RNA, 19 nt, Artificial Sequence
  Description of Artificial Sequence:  siNA antisense region
cuuccugaaagccggagcu

SEQ ID NO: 604 - RNA, 19 nt, Artificial Sequence
  Description of Artificial Sequence:  siNA antisense region
caucacucagacuuuuauc

SEQ ID NO: 605 - RNA, 19 nt, Artificial Sequence
  Description of Artificial Sequence:  siNA antisense region
aauccuccucuuccucaac

SEQ ID NO: 606 - RNA, 19 nt, Artificial Sequence
  Description of Artificial Sequence:  siNA antisense region
ccuuguagaaaccgucaga

SEQ ID NO: 607 - RNA, 19 nt, Artificial Sequence
  Description of Artificial Sequence:  siNA antisense region
cuuccauagugaugggcuc

SEQ ID NO: 608 - RNA, 19 nt, Artificial Sequence
  Description of Artificial Sequence:  siNA antisense region
aacuguaagaaaucagauc

SEQ ID NO: 609 - RNA, 19 nt, Artificial Sequence
  Description of Artificial Sequence:  siNA antisense region
ugccucuggccacuugaaa

SEQ ID NO: 610 - RNA, 19 nt, Artificial Sequence
  Description of Artificial Sequence:  siNA antisense region
uggaagacaggaacuccau

SEQ ID NO: 611 - RNA, 19 nt, Artificial Sequence
  Description of Artificial Sequence:  siNA antisense region
cccgaugaaugcacuuucu

SEQ ID NO: 612 - RNA, 19 nt, Artificial Sequence
  Description of Artificial Sequence:  siNA antisense region
uguuucucgcugccagguc

SEQ ID NO: 613 - RNA, 19 nt, Artificial Sequence
  Description of Artificial Sequence:  siNA antisense region
uguucucagauaaaagaau

SEQ ID NO: 614 - RNA, 19 nt, Artificial Sequence
  Description of Artificial Sequence:  siNA antisense region
cacaaaucuucaccacguu

SEQ ID NO: 615 - RNA, 19 nt, Artificial Sequence
  Description of Artificial Sequence:  siNA antisense region
cccgggcaaggccaaaauc

SEQ ID NO: 616 - RNA, 19 nt, Artificial Sequence
  Description of Artificial Sequence:  siNA antisense region
cgggguucuuauaaauauc

SEQ ID NO: 617 - RNA, 19 nt, Artificial Sequence
  Description of Artificial Sequence:  siNA antisense region
cuccuuuucucacauaauc

SEQ ID NO: 618 - RNA, 19 nt, Artificial Sequence
  Description of Artificial Sequence:  siNA antisense region
ucagaggaagucgaguauc

SEQ ID NO: 619 - RNA, 19 nt, Artificial Sequence
  Description of Artificial Sequence:  siNA antisense region
auucgggagccauccauuu

SEQ ID NO: 620 - RNA, 19 nt, Artificial Sequence
  Description of Artificial Sequence:  siNA antisense region
agauuuugucaaagauaga

SEQ ID NO: 621 - RNA, 19 nt, Artificial Sequence
  Description of Artificial Sequence:  siNA antisense region
cgucgcucuuggugcugua

SEQ ID NO: 622 - RNA, 19 nt, Artificial Sequence
  Description of Artificial Sequence:  siNA antisense region
auacuccguaagaccacac

SEQ ID NO: 623 - RNA, 19 nt, Artificial Sequence
  Description of Artificial Sequence:  siNA antisense region
agaagauuucccacagcaa

SEQ ID NO: 624 - RNA, 19 nt, Artificial Sequence
  Description of Artificial Sequence:  siNA antisense region
auggagacccaccuaagga

SEQ ID NO: 625 - RNA, 19 nt, Artificial Sequence
  Description of Artificial Sequence:  siNA antisense region
ccauuuguacuccugggua

SEQ ID NO: 626 - RNA, 19 nt, Artificial Sequence
  Description of Artificial Sequence:  siNA antisense region
gacugcaaaaguccucauc

SEQ ID NO: 627 - RNA, 19 nt, Artificial Sequence
  Description of Artificial Sequence:  siNA antisense region
ucaugccuucccucaggcg

SEQ ID NO: 628 - RNA, 19 nt, Artificial Sequence
  Description of Artificial Sequence:  siNA antisense region
acucaggagcucucauccu

SEQ ID NO: 629 - RNA, 19 nt, Artificial Sequence
  Description of Artificial Sequence:  siNA antisense region
agauuucaggaguagagua

SEQ ID NO: 630 - RNA, 19 nt, Artificial Sequence
  Description of Artificial Sequence:  siNA antisense region
aguccagcaugaucugaua

SEQ ID NO: 631 - RNA, 19 nt, Artificial Sequence
  Description of Artificial Sequence:  siNA antisense region
uugggucucugugccagca

SEQ ID NO: 632 - RNA, 19 nt, Artificial Sequence
  Description of Artificial Sequence:  siNA antisense region
caaaucuuggccuuucuuu

SEQ ID NO: 633 - RNA, 19 nt, Artificial Sequence
  Description of Artificial Sequence:  siNA antisense region
guuuuuccacaaguucugc

SEQ ID NO: 634 - RNA, 19 nt, Artificial Sequence
  Description of Artificial Sequence:  siNA antisense region
cuugaagcaaaucaccuag

SEQ ID NO: 635 - RNA, 19 nt, Artificial Sequence
  Description of Artificial Sequence:  siNA antisense region
cauccuguuguacauuugc

SEQ ID NO: 636 - RNA, 19 nt, Artificial Sequence
  Description of Artificial Sequence:  siNA antisense region
uugggauguagucuuuacc

SEQ ID NO: 637 - RNA, 19 nt, Artificial Sequence
  Description of Artificial Sequence:  siNA antisense region
cugucaguauggcauugau

SEQ ID NO: 638 - RNA, 19 nt, Artificial Sequence
  Description of Artificial Sequence:  siNA antisense region
auguaaacccacuauuucc

SEQ ID NO: 639 - RNA, 19 nt, Artificial Sequence
  Description of Artificial Sequence:  siNA antisense region
agaaggcaggaguugagua

SEQ ID NO: 640 - RNA, 19 nt, Artificial Sequence
  Description of Artificial Sequence:  siNA antisense region
ccuugaagaaguccucaga

SEQ ID NO: 641 - RNA, 19 nt, Artificial Sequence
  Description of Artificial Sequence:  siNA antisense region
ucggagcugaaauacuuuc

SEQ ID NO: 642 - RNA, 19 nt, Artificial Sequence
  Description of Artificial Sequence:  siNA antisense region
agcuuccugaauuaaacuu

SEQ ID NO: 643 - RNA, 19 nt, Artificial Sequence
  Description of Artificial Sequence:  siNA antisense region
cauaucugacaucaucaga

SEQ ID NO: 644 - RNA, 19 nt, Artificial Sequence
  Description of Artificial Sequence:  siNA antisense region
ugaacuugaaagcauuuac

SEQ ID NO: 645 - RNA, 19 nt, Artificial Sequence
  Description of Artificial Sequence:  siNA antisense region
ugauucuuuccaggcucau

SEQ ID NO: 646 - RNA, 19 nt, Artificial Sequence
  Description of Artificial Sequence:  siNA antisense region
aaaguucuucaaagguuuu

SEQ ID NO: 647 - RNA, 19 nt, Artificial Sequence
  Description of Artificial Sequence:  siNA antisense region
uggagguggcauucgguaa

SEQ ID NO: 648 - RNA, 19 nt, Artificial Sequence
  Description of Artificial Sequence:  siNA antisense region
ccugguagucaucaaacau

SEQ ID NO: 649 - RNA, 19 nt, Artificial Sequence
  Description of Artificial Sequence:  siNA antisense region
acagagugcugcugucgcc

SEQ ID NO: 650 - RNA, 19 nt, Artificial Sequence
  Description of Artificial Sequence:  siNA antisense region
ucagcaugggagaggccaa

SEQ ID NO: 651 - RNA, 19 nt, Artificial Sequence
  Description of Artificial Sequence:  siNA antisense region
caguccaggugaagcgcuu

SEQ ID NO: 652 - RNA, 19 nt, Artificial Sequence
  Description of Artificial Sequence:  siNA antisense region
aggccuuggguuugcuguc

SEQ ID NO: 653 - RNA, 19 nt, Artificial Sequence
  Description of Artificial Sequence:  siNA antisense region
ucaagucaaucuugagcga

SEQ ID NO: 654 - RNA, 19 nt, Artificial Sequence
  Description of Artificial Sequence:  siNA antisense region
uacuuuuacugguuacucu

SEQ ID NO: 655 - RNA, 19 nt, Artificial Sequence
  Description of Artificial Sequence:  siNA antisense region
cagacagccccgacuccuu

SEQ ID NO: 656 - RNA, 19 nt, Artificial Sequence
  Description of Artificial Sequence:  siNA antisense region
aacugggccugcugacauc

SEQ ID NO: 657 - RNA, 19 nt, Artificial Sequence
  Description of Artificial Sequence:  siNA antisense region
cacagcuggaauggcagaa

SEQ ID NO: 658 - RNA, 19 nt, Artificial Sequence
  Description of Artificial Sequence:  siNA antisense region
ugccuucgcugacgugccc

SEQ ID NO: 659 - RNA, 19 nt, Artificial Sequence
  Description of Artificial Sequence:  siNA antisense region
cguaggugaaccugcgcuu

SEQ ID NO: 660 - RNA, 19 nt, Artificial Sequence
  Description of Artificial Sequence:  siNA antisense region
uuuccagcucagcgugguc

SEQ ID NO: 661 - RNA, 19 nt, Artificial Sequence
  Description of Artificial Sequence:  siNA antisense region
agcagcacgcgauuuuccu

SEQ ID NO: 662 - RNA, 19 nt, Artificial Sequence
  Description of Artificial Sequence:  siNA antisense region
uguagucugggggcgggga

SEQ ID NO: 663 - RNA, 19 nt, Artificial Sequence
  Description of Artificial Sequence:  siNA antisense region
aguacaggaccaccgaguu

SEQ ID NO: 664 - RNA, 19 nt, Artificial Sequence
  Description of Artificial Sequence:  siNA antisense region
ucuagauggguggggugga

SEQ ID NO: 665 - RNA, 19 nt, Artificial Sequence
  Description of Artificial Sequence:  siNA antisense region
uaaggcuucgugucaaacu

SEQ ID NO: 666 - RNA, 19 nt, Artificial Sequence
  Description of Artificial Sequence:  siNA antisense region
cacaugugcuucuagaaau

SEQ ID NO: 667 - RNA, 19 nt, Artificial Sequence
  Description of Artificial Sequence:  siNA antisense region
uuccuggggguauaaauac

SEQ ID NO: 668 - RNA, 19 nt, Artificial Sequence
  Description of Artificial Sequence:  siNA antisense region
auacuggcaaaagcuaguu

SEQ ID NO: 669 - RNA, 19 nt, Artificial Sequence
  Description of Artificial Sequence:  siNA antisense region
uaaacuuauauaugcauaa

SEQ ID NO: 670 - RNA, 19 nt, Artificial Sequence
  Description of Artificial Sequence:  siNA antisense region
cauggaaagauaaaggugu

SEQ ID NO: 671 - RNA, 19 nt, Artificial Sequence
  Description of Artificial Sequence:  siNA antisense region
caaaaagcagcuggcuccc

SEQ ID NO: 672 - RNA, 19 nt, Artificial Sequence
  Description of Artificial Sequence:  siNA antisense region
gcacuauuaaaaaaaucac

SEQ ID NO: 673 - RNA, 19 nt, Artificial Sequence
  Description of Artificial Sequence:  siNA antisense region
guuagucaaaaaaaaaaag

SEQ ID NO: 674 - RNA, 19 nt, Artificial Sequence
  Description of Artificial Sequence:  siNA antisense region
aucuggaguuacauucuug

SEQ ID NO: 675 - RNA, 19 nt, Artificial Sequence
  Description of Artificial Sequence:  siNA antisense region
acuugucacuauuucucua

SEQ ID NO: 676 - RNA, 19 nt, Artificial Sequence
  Description of Artificial Sequence:  siNA antisense region
uuagcaguaguguucuuca

SEQ ID NO: 677 - RNA, 19 nt, Artificial Sequence
  Description of Artificial Sequence:  siNA antisense region
acugaguaacaugaggauu

SEQ ID NO: 678 - RNA, 19 nt, Artificial Sequence
  Description of Artificial Sequence:  siNA antisense region
aggaaggauuucucuaaca

SEQ ID NO: 679 - RNA, 19 nt, Artificial Sequence
  Description of Artificial Sequence:  siNA antisense region
agggaagucauuggguuua

SEQ ID NO: 680 - RNA, 19 nt, Artificial Sequence
  Description of Artificial Sequence:  siNA antisense region
gguggcggggguuggagca

SEQ ID NO: 681 - RNA, 19 nt, Artificial Sequence
  Description of Artificial Sequence:  siNA antisense region
ugguccugcgugcccugag

SEQ ID NO: 682 - RNA, 19 nt, Artificial Sequence
  Description of Artificial Sequence:  siNA antisense region
gcagcuccucaaucaaacu

SEQ ID NO: 683 - RNA, 19 nt, Artificial Sequence
  Description of Artificial Sequence:  siNA antisense region
augcauugggugaucagug

SEQ ID NO: 684 - RNA, 19 nt, Artificial Sequence
  Description of Artificial Sequence:  siNA antisense region
ggcccagugggguacguga

SEQ ID NO: 685 - RNA, 19 nt, Artificial Sequence
  Description of Artificial Sequence:  siNA antisense region
guuuugggcugcagggcug

SEQ ID NO: 686 - RNA, 19 nt, Artificial Sequence
  Description of Artificial Sequence:  siNA antisense region
acgggcuuguugcccuggg

SEQ ID NO: 687 - RNA, 19 nt, Artificial Sequence
  Description of Artificial Sequence:  siNA antisense region
agugauccccuggggcuaa

SEQ ID NO: 688 - RNA, 19 nt, Artificial Sequence
  Description of Artificial Sequence:  siNA antisense region
auguugcucaggccagcca

SEQ ID NO: 689 - RNA, 19 nt, Artificial Sequence
  Description of Artificial Sequence:  siNA antisense region
ugcuagaggacucccgaga

SEQ ID NO: 690 - RNA, 19 nt, Artificial Sequence
  Description of Artificial Sequence:  siNA antisense region
ccucacaugucuuaggccu

SEQ ID NO: 691 - RNA, 19 nt, Artificial Sequence
  Description of Artificial Sequence:  siNA antisense region
gcuuuuuuuccuuuuccuc

SEQ ID NO: 692 - RNA, 19 nt, Artificial Sequence
  Description of Artificial Sequence:  siNA antisense region
uuuucucccuugcuuuuug

SEQ ID NO: 693 - RNA, 19 nt, Artificial Sequence
  Description of Artificial Sequence:  siNA antisense region
gccuucucccgguuucucu

SEQ ID NO: 694 - RNA, 19 nt, Artificial Sequence
  Description of Artificial Sequence:  siNA antisense region
ucucaaauucuuucucaug

SEQ ID NO: 695 - RNA, 19 nt, Artificial Sequence
  Description of Artificial Sequence:  siNA antisense region
ccgugcccacauggugcgu

SEQ ID NO: 696 - RNA, 19 nt, Artificial Sequence
  Description of Artificial Sequence:  siNA antisense region
gcugagccccgucccccuc

SEQ ID NO: 697 - RNA, 19 nt, Artificial Sequence
  Description of Artificial Sequence:  siNA antisense region
agccacugaaauggcauug

SEQ ID NO: 698 - RNA, 19 nt, Artificial Sequence
  Description of Artificial Sequence:  siNA antisense region
gaagggucagagcugggaa

SEQ ID NO: 699 - RNA, 19 nt, Artificial Sequence
  Description of Artificial Sequence:  siNA antisense region
gcugggcccucaaauguag

SEQ ID NO: 700 - RNA, 19 nt, Artificial Sequence
  Description of Artificial Sequence:  siNA antisense region
gcuguccaucugcuccugg

SEQ ID NO: 701 - RNA, 19 nt, Artificial Sequence
  Description of Artificial Sequence:  siNA antisense region
agaaaauguccccucaucg

SEQ ID NO: 702 - RNA, 19 nt, Artificial Sequence
  Description of Artificial Sequence:  siNA antisense region
ucuugccucccagaaucca

SEQ ID NO: 703 - RNA, 19 nt, Artificial Sequence
  Description of Artificial Sequence:  siNA antisense region
aaaagauauuuguccuuuu

SEQ ID NO: 704 - RNA, 19 nt, Artificial Sequence
  Description of Artificial Sequence:  siNA antisense region
aauuugcuuuaguuccaaa

SEQ ID NO: 705 - RNA, 19 nt, Artificial Sequence
  Description of Artificial Sequence:  siNA antisense region
ccauagguaaaggucuaaa

SEQ ID NO: 706 - RNA, 19 nt, Artificial Sequence
  Description of Artificial Sequence:  siNA antisense region
auggacauagaaccacuuc

SEQ ID NO: 707 - RNA, 19 nt, Artificial Sequence
  Description of Artificial Sequence:  siNA antisense region
aacaugccacgaaugagaa

SEQ ID NO: 708 - RNA, 19 nt, Artificial Sequence
  Description of Artificial Sequence:  siNA antisense region
cucagugcuacaaaucaaa

SEQ ID NO: 709 - RNA, 19 nt, Artificial Sequence
  Description of Artificial Sequence:  siNA antisense region
ucagaguugagugccaccc

SEQ ID NO: 710 - RNA, 19 nt, Artificial Sequence
  Description of Artificial Sequence:  siNA antisense region
ggagccaaaaguaugggcu

SEQ ID NO: 711 - RNA, 19 nt, Artificial Sequence
  Description of Artificial Sequence:  siNA antisense region
ucagugcaucuuacuagag

SEQ ID NO: 712 - RNA, 19 nt, Artificial Sequence
  Description of Artificial Sequence:  siNA antisense region
cuaacucuggcuaaguuuu

SEQ ID NO: 713 - RNA, 19 nt, Artificial Sequence
  Description of Artificial Sequence:  siNA antisense region
ucauggccuggagacaacc

SEQ ID NO: 714 - RNA, 19 nt, Artificial Sequence
  Description of Artificial Sequence:  siNA antisense region
auuuucaguguaaggccau

SEQ ID NO: 715 - RNA, 19 nt, Artificial Sequence
  Description of Artificial Sequence:  siNA antisense region
cccaaaauagaaugugaca

SEQ ID NO: 716 - RNA, 19 nt, Artificial Sequence
  Description of Artificial Sequence:  siNA antisense region
cuggacuauauauuaauac

SEQ ID NO: 717 - RNA, 19 nt, Artificial Sequence
  Description of Artificial Sequence:  siNA antisense region
agaaauugaguuaaguguc

SEQ ID NO: 718 - RNA, 19 nt, Artificial Sequence
  Description of Artificial Sequence:  siNA antisense region
caaaacagaauaauaccaa

SEQ ID NO: 719 - RNA, 19 nt, Artificial Sequence
  Description of Artificial Sequence:  siNA antisense region
cuuucacaacuaacugugc

SEQ ID NO: 720 - RNA, 19 nt, Artificial Sequence
  Description of Artificial Sequence:  siNA antisense region
uucauucuucucagcuuuc

SEQ ID NO: 721 - RNA, 19 nt, Artificial Sequence
  Description of Artificial Sequence:  siNA antisense region
ucuccucaggacugcauuu

SEQ ID NO: 722 - RNA, 19 nt, Artificial Sequence
  Description of Artificial Sequence:  siNA antisense region
uuuugauauggagaaaacu

SEQ ID NO: 723 - RNA, 19 nt, Artificial Sequence
  Description of Artificial Sequence:  siNA antisense region
uuccuccaucagcccucgu

SEQ ID NO: 724 - RNA, 19 nt, Artificial Sequence
  Description of Artificial Sequence:  siNA antisense region
uugaccuuauugaccuuuu

SEQ ID NO: 725 - RNA, 19 nt, Artificial Sequence
  Description of Artificial Sequence:  siNA antisense region
uagagacggggucuucccu

SEQ ID NO: 726 - RNA, 19 nt, Artificial Sequence
  Description of Artificial Sequence:  siNA antisense region
gaauugguuugguugguau

SEQ ID NO: 727 - RNA, 19 nt, Artificial Sequence
  Description of Artificial Sequence:  siNA antisense region
ggucccaacuguguuggug

SEQ ID NO: 728 - RNA, 19 nt, Artificial Sequence
  Description of Artificial Sequence:  siNA antisense region
cugacuuccuguguuuugg

SEQ ID NO: 729 - RNA, 19 nt, Artificial Sequence
  Description of Artificial Sequence:  siNA antisense region
aaugaaaaggaaacgugac

SEQ ID NO: 730 - RNA, 19 nt, Artificial Sequence
  Description of Artificial Sequence:  siNA antisense region
auaguggaauccccauuaa

SEQ ID NO: 731 - RNA, 19 nt, Artificial Sequence
  Description of Artificial Sequence:  siNA antisense region
cuuucagauuagugugaga

SEQ ID NO: 732 - RNA, 19 nt, Artificial Sequence
  Description of Artificial Sequence:  siNA antisense region
cuaaugcucuuccacaucc

SEQ ID NO: 733 - RNA, 19 nt, Artificial Sequence
  Description of Artificial Sequence:  siNA antisense region
gugcuuaauaugcgccagc

SEQ ID NO: 734 - RNA, 19 nt, Artificial Sequence
  Description of Artificial Sequence:  siNA antisense region
uuacucaaggagcuuaaag

SEQ ID NO: 735 - RNA, 19 nt, Artificial Sequence
  Description of Artificial Sequence:  siNA antisense region
aaauuacauaccaccuuuu

SEQ ID NO: 736 - RNA, 19 nt, Artificial Sequence
  Description of Artificial Sequence:  siNA antisense region
uggagaaauaccuugcaua

SEQ ID NO: 737 - RNA, 19 nt, Artificial Sequence
  Description of Artificial Sequence:  siNA antisense region
aauauccugagucccaacu

SEQ ID NO: 738 - RNA, 19 nt, Artificial Sequence
  Description of Artificial Sequence:  siNA antisense region
agugauggcucauuaacua

SEQ ID NO: 739 - RNA, 19 nt, Artificial Sequence
  Description of Artificial Sequence:  siNA antisense region
aaaaugggcuuuucuucua

SEQ ID NO: 740 - RNA, 19 nt, Artificial Sequence
  Description of Artificial Sequence:  siNA antisense region
caaguuucaaagcaguuga

SEQ ID NO: 741 - RNA, 19 nt, Artificial Sequence
  Description of Artificial Sequence:  siNA antisense region
ucaugcucagaccccaggc

SEQ ID NO: 742 - RNA, 19 nt, Artificial Sequence
  Description of Artificial Sequence:  siNA antisense region
ccugucucccuauucccau

SEQ ID NO: 743 - RNA, 19 nt, Artificial Sequence
  Description of Artificial Sequence:  siNA antisense region
guaggcgcccuuuccuacc

SEQ ID NO: 744 - RNA, 19 nt, Artificial Sequence
  Description of Artificial Sequence:  siNA antisense region
aucuuuagacccugaagag

SEQ ID NO: 745 - RNA, 19 nt, Artificial Sequence
  Description of Artificial Sequence:  siNA antisense region
cgauccaaggcccacuuga

SEQ ID NO: 746 - RNA, 19 nt, Artificial Sequence
  Description of Artificial Sequence:  siNA antisense region
caaacagagccagcuuagc

SEQ ID NO: 747 - RNA, 19 nt, Artificial Sequence
  Description of Artificial Sequence:  siNA antisense region
aacuugcauaaauagcauc

SEQ ID NO: 748 - RNA, 19 nt, Artificial Sequence
  Description of Artificial Sequence:  siNA antisense region
ccuaaauacauagacccua

SEQ ID NO: 749 - RNA, 19 nt, Artificial Sequence
  Description of Artificial Sequence:  siNA antisense region
ccugaagaguaggcgcauc

SEQ ID NO: 750 - RNA, 19 nt, Artificial Sequence
  Description of Artificial Sequence:  siNA antisense region
cccacuugaucuuuagacc

SEQ ID NO: 751 - RNA, 19 nt, Artificial Sequence
  Description of Artificial Sequence:  siNA antisense region
cagcuuagcgauccaaggc

SEQ ID NO: 752 - RNA, 19 nt, Artificial Sequence
  Description of Artificial Sequence:  siNA antisense region
aauagcaucaaacagagcc

SEQ ID NO: 753 - RNA, 19 nt, Artificial Sequence
  Description of Artificial Sequence:  siNA antisense region
uagacccuaacuugcauaa

SEQ ID NO: 754 - RNA, 19 nt, Artificial Sequence
  Description of Artificial Sequence:  siNA antisense region
gcagacauccuaaauacau

SEQ ID NO: 755 - RNA, 19 nt, Artificial Sequence
  Description of Artificial Sequence:  siNA antisense region
ugacuggcugcagaaggug

SEQ ID NO: 756 - RNA, 19 nt, Artificial Sequence
  Description of Artificial Sequence:  siNA antisense region
uguugccucuccagcuucu

SEQ ID NO: 757 - RNA, 19 nt, Artificial Sequence
  Description of Artificial Sequence:  siNA antisense region
caagaagcagcaauccacu

SEQ ID NO: 758 - RNA, 19 nt, Artificial Sequence
  Description of Artificial Sequence:  siNA antisense region
gaagcauacucuucucccc

SEQ ID NO: 759 - RNA, 19 nt, Artificial Sequence
  Description of Artificial Sequence:  siNA antisense region
aaauuacauggauaaaagg

SEQ ID NO: 760 - RNA, 19 nt, Artificial Sequence
  Description of Artificial Sequence:  siNA antisense region
agcucagguucuacaguua

SEQ ID NO: 761 - RNA, 19 nt, Artificial Sequence
  Description of Artificial Sequence:  siNA antisense region
cauucuucgguuacuuaga

SEQ ID NO: 762 - RNA, 19 nt, Artificial Sequence
  Description of Artificial Sequence:  siNA antisense region
cauaagaacagaggcauac

SEQ ID NO: 763 - RNA, 19 nt, Artificial Sequence
  Description of Artificial Sequence:  siNA antisense region
uuaaacaaggauguggcac

SEQ ID NO: 764 - RNA, 19 nt, Artificial Sequence
  Description of Artificial Sequence:  siNA antisense region
ucuucauacagagagccuu

SEQ ID NO: 765 - RNA, 19 nt, Artificial Sequence
  Description of Artificial Sequence:  siNA antisense region
gcugaugacggucccaucu

SEQ ID NO: 766 - RNA, 19 nt, Artificial Sequence
  Description of Artificial Sequence:  siNA antisense region
aggcucacuagggaaugug

SEQ ID NO: 767 - RNA, 19 nt, Artificial Sequence
  Description of Artificial Sequence:  siNA antisense region
ccgcugccaggagccagua

SEQ ID NO: 768 - RNA, 19 nt, Artificial Sequence
  Description of Artificial Sequence:  siNA antisense region
gugagucuuccacaaaagc

SEQ ID NO: 769 - RNA, 19 nt, Artificial Sequence
  Description of Artificial Sequence:  siNA antisense region
acuccucucuucuggcuag

SEQ ID NO: 770 - RNA, 19 nt, Artificial Sequence
  Description of Artificial Sequence:  siNA antisense region
gguggagaggacuguccca

SEQ ID NO: 771 - RNA, 19 nt, Artificial Sequence
  Description of Artificial Sequence:  siNA antisense region
uguuuggauuuagaucuug

SEQ ID NO: 772 - RNA, 19 nt, Artificial Sequence
  Description of Artificial Sequence:  siNA antisense region
cuggcucuagccugcuuuu

SEQ ID NO: 773 - RNA, 19 nt, Artificial Sequence
  Description of Artificial Sequence:  siNA antisense region
aaagauuuguccucucuuc

SEQ ID NO: 774 - RNA, 19 nt, Artificial Sequence
  Description of Artificial Sequence:  siNA antisense region
guaaagaagaggaacaaca

SEQ ID NO: 775 - RNA, 19 nt, Artificial Sequence
  Description of Artificial Sequence:  siNA antisense region
caggugguuugcguaugug

SEQ ID NO: 776 - RNA, 19 nt, Artificial Sequence
  Description of Artificial Sequence:  siNA antisense region
uaaaauugccagcugucac

SEQ ID NO: 777 - RNA, 19 nt, Artificial Sequence
  Description of Artificial Sequence:  siNA antisense region
uuccaguuaccugauuuau

SEQ ID NO: 778 - RNA, 19 nt, Artificial Sequence
  Description of Artificial Sequence:  siNA antisense region
uuucugaguuuaaccuccu

SEQ ID NO: 779 - RNA, 19 nt, Artificial Sequence
  Description of Artificial Sequence:  siNA antisense region
uugacugaggucuucuuuu

SEQ ID NO: 780 - RNA, 19 nt, Artificial Sequence
  Description of Artificial Sequence:  siNA antisense region
aaaaaaaaaaguagagaau

SEQ ID NO: 781 - RNA, 19 nt, Artificial Sequence
  Description of Artificial Sequence:  siNA antisense region
uaucugauuuggaaaaaaa

SEQ ID NO: 782 - RNA, 19 nt, Artificial Sequence
  Description of Artificial Sequence:  siNA antisense region
cacuauuugcugggcuauu

SEQ ID NO: 783 - RNA, 19 nt, Artificial Sequence
  Description of Artificial Sequence:  siNA antisense region
uaagguuuuauuuguuauc

SEQ ID NO: 784 - RNA, 19 nt, Artificial Sequence
  Description of Artificial Sequence:  siNA antisense region
aaucaagacaugaacagcu

SEQ ID NO: 785 - RNA, 19 nt, Artificial Sequence
  Description of Artificial Sequence:  siNA antisense region
uuaagaauuaauuauugaa

SEQ ID NO: 786 - RNA, 19 nt, Artificial Sequence
  Description of Artificial Sequence:  siNA antisense region
auuauggucucuuaaugau

SEQ ID NO: 787 - RNA, 19 nt, Artificial Sequence
  Description of Artificial Sequence:  siNA antisense region
ucuugaaaaggaguauuua

SEQ ID NO: 788 - RNA, 19 nt, Artificial Sequence
  Description of Artificial Sequence:  siNA antisense region
cuaaugguuuugcuuuucu

SEQ ID NO: 789 - RNA, 19 nt, Artificial Sequence
  Description of Artificial Sequence:  siNA antisense region
aggagcugaguaacaauuc

SEQ ID NO: 790 - RNA, 19 nt, Artificial Sequence
  Description of Artificial Sequence:  siNA antisense region
cuacaaaccugaguuugaa

SEQ ID NO: 791 - RNA, 19 nt, Artificial Sequence
  Description of Artificial Sequence:  siNA antisense region
uggauggacucauguaugc

SEQ ID NO: 792 - RNA, 19 nt, Artificial Sequence
  Description of Artificial Sequence:  siNA antisense region
gaaccauucuuugacugau

SEQ ID NO: 793 - RNA, 19 nt, Artificial Sequence
  Description of Artificial Sequence:  siNA antisense region
acauuaagacuccagaugg

SEQ ID NO: 794 - RNA, 19 nt, Artificial Sequence
  Description of Artificial Sequence:  siNA antisense region
gucuccauuuuucuuucua

SEQ ID NO: 795 - RNA, 19 nt, Artificial Sequence
  Description of Artificial Sequence:  siNA antisense region
acuagcucauuauuacaag

SEQ ID NO: 796 - RNA, 19 nt, Artificial Sequence
  Description of Artificial Sequence:  siNA antisense region
augaacaagcacuuuguaa

SEQ ID NO: 797 - RNA, 19 nt, Artificial Sequence
  Description of Artificial Sequence:  siNA antisense region
auuuucagugcuauuuuaa

SEQ ID NO: 798 - RNA, 19 nt, Artificial Sequence
  Description of Artificial Sequence:  siNA antisense region
caguuaauucauguuucaa

SEQ ID NO: 799 - RNA, 19 nt, Artificial Sequence
  Description of Artificial Sequence:  siNA antisense region
aaaugauuggaauauuauc

SEQ ID NO: 800 - RNA, 19 nt, Artificial Sequence
  Description of Artificial Sequence:  siNA antisense region
auuuuugucauaaauggca

SEQ ID NO: 801 - RNA, 19 nt, Artificial Sequence
  Description of Artificial Sequence:  siNA antisense region
ucuuuguuagugccaacca

SEQ ID NO: 802 - RNA, 19 nt, Artificial Sequence
  Description of Artificial Sequence:  siNA antisense region
cugaaaggaagugcucguu

SEQ ID NO: 803 - RNA, 19 nt, Artificial Sequence
  Description of Artificial Sequence:  siNA antisense region
uacauuaucucagaaacuc

SEQ ID NO: 804 - RNA, 19 nt, Artificial Sequence
  Description of Artificial Sequence:  siNA antisense region
cacccagacuguuccacgu

SEQ ID NO: 805 - RNA, 19 nt, Artificial Sequence
  Description of Artificial Sequence:  siNA antisense region
augguuucagccccauucc

SEQ ID NO: 806 - RNA, 19 nt, Artificial Sequence
  Description of Artificial Sequence:  siNA antisense region
caagacacagacuugcaca

SEQ ID NO: 807 - RNA, 19 nt, Artificial Sequence
  Description of Artificial Sequence:  siNA antisense region
ugucacuucuuggacugac

SEQ ID NO: 808 - RNA, 19 nt, Artificial Sequence
  Description of Artificial Sequence:  siNA antisense region
cuaaaauuaacaucucggu

SEQ ID NO: 809 - RNA, 19 nt, Artificial Sequence
  Description of Artificial Sequence:  siNA antisense region
gaaacaaggcacggguccc

SEQ ID NO: 810 - RNA, 19 nt, Artificial Sequence
  Description of Artificial Sequence:  siNA antisense region
ugcauucuugugggcuagg

SEQ ID NO: 811 - RNA, 19 nt, Artificial Sequence
  Description of Artificial Sequence:  siNA antisense region
gaguaucuguuugauguuu

SEQ ID NO: 812 - RNA, 19 nt, Artificial Sequence
  Description of Artificial Sequence:  siNA antisense region
aauuuaaaugaggcuagcg

SEQ ID NO: 813 - RNA, 19 nt, Artificial Sequence
  Description of Artificial Sequence:  siNA antisense region
ugcacuccuccuuuaauca

SEQ ID NO: 814 - RNA, 19 nt, Artificial Sequence
  Description of Artificial Sequence:  siNA antisense region
accacugucggccaaagau

SEQ ID NO: 815 - RNA, 19 nt, Artificial Sequence
  Description of Artificial Sequence:  siNA antisense region
acacacacacacaguuaca

SEQ ID NO: 816 - RNA, 19 nt, Artificial Sequence
  Description of Artificial Sequence:  siNA antisense region
acacacacacacacacaca

SEQ ID NO: 817 - RNA, 19 nt, Artificial Sequence
  Description of Artificial Sequence:  siNA antisense region
ccacacccacacacacaca

SEQ ID NO: 818 - RNA, 19 nt, Artificial Sequence
  Description of Artificial Sequence:  siNA antisense region
cacaaaacacacauacacc

SEQ ID NO: 819 - RNA, 19 nt, Artificial Sequence
  Description of Artificial Sequence:  siNA antisense region
uuuccuuaaauaguuaugc

SEQ ID NO: 820 - RNA, 19 nt, Artificial Sequence
  Description of Artificial Sequence:  siNA antisense region
guaacuuuaaaauuccagu

SEQ ID NO: 821 - RNA, 19 nt, Artificial Sequence
  Description of Artificial Sequence:  siNA antisense region
uucuugguuuguauaaaag

SEQ ID NO: 822 - RNA, 19 nt, Artificial Sequence
  Description of Artificial Sequence:  siNA antisense region
uuauaucuguagcauauau

SEQ ID NO: 823 - RNA, 19 nt, Artificial Sequence
  Description of Artificial Sequence:  siNA antisense region
gaccaaaccaugucugucu

SEQ ID NO: 824 - RNA, 19 nt, Artificial Sequence
  Description of Artificial Sequence:  siNA antisense region
ucaugacuagaaauauagg

SEQ ID NO: 825 - RNA, 19 nt, Artificial Sequence
  Description of Artificial Sequence:  siNA antisense region
guauacaaaauacauucau

SEQ ID NO: 826 - RNA, 19 nt, Artificial Sequence
  Description of Artificial Sequence:  siNA antisense region
guauauuauaugaagaugg

SEQ ID NO: 827 - RNA, 19 nt, Artificial Sequence
  Description of Artificial Sequence:  siNA antisense region
auuaagaaauauuuuuaag

SEQ ID NO: 828 - RNA, 19 nt, Artificial Sequence
  Description of Artificial Sequence:  siNA antisense region
guacgauuacaaaucccaa

SEQ ID NO: 829 - RNA, 19 nt, Artificial Sequence
  Description of Artificial Sequence:  siNA antisense region
aguuuaucaauuaaguugg

SEQ ID NO: 830 - RNA, 19 nt, Artificial Sequence
  Description of Artificial Sequence:  siNA antisense region
acauaaaagcaguugccaa

SEQ ID NO: 831 - RNA, 19 nt, Artificial Sequence
  Description of Artificial Sequence:  siNA antisense region
uuuauggaaggagacagaa

SEQ ID NO: 832 - RNA, 19 nt, Artificial Sequence
  Description of Artificial Sequence:  siNA antisense region
aauuaguauuuugaaaaau

SEQ ID NO: 833 - RNA, 19 nt, Artificial Sequence
  Description of Artificial Sequence:  siNA antisense region
agagcuuuuucuuuguuga

SEQ ID NO: 834 - RNA, 19 nt, Artificial Sequence
  Description of Artificial Sequence:  siNA antisense region
uuuauuuuaggaaaaaaaa

SEQ ID NO: 835 - RNA, 19 nt, Artificial Sequence
  Description of Artificial Sequence:  siNA antisense region
aacaaggauaaauuugagu

SEQ ID NO: 836 - RNA, 19 nt, Artificial Sequence
  Description of Artificial Sequence:  siNA antisense region
uaauuuuucucugcucuaa

SEQ ID NO: 837 - RNA, 19 nt, Artificial Sequence
  Description of Artificial Sequence:  siNA antisense region
ccauuucaaaguuuuucuu

SEQ ID NO: 838 - RNA, 19 nt, Artificial Sequence
  Description of Artificial Sequence:  siNA antisense region
uuuagcaauuuuuugagac

SEQ ID NO: 839 - RNA, 19 nt, Artificial Sequence
  Description of Artificial Sequence:  siNA antisense region
aguuuuccauugaaaauau

SEQ ID NO: 840 - RNA, 19 nt, Artificial Sequence
  Description of Artificial Sequence:  siNA antisense region
ucagcuaaacuaacauuua

SEQ ID NO: 841 - RNA, 19 nt, Artificial Sequence
  Description of Artificial Sequence:  siNA antisense region
uucgaaaaccccauacaau

SEQ ID NO: 842 - RNA, 19 nt, Artificial Sequence
  Description of Artificial Sequence:  siNA antisense region
caaacaaaaagugaaaggu

SEQ ID NO: 843 - RNA, 19 nt, Artificial Sequence
  Description of Artificial Sequence:  siNA antisense region
guugugaaauagguaaaac

SEQ ID NO: 844 - RNA, 19 nt, Artificial Sequence
  Description of Artificial Sequence:  siNA antisense region
uuauuggcaauuuacacag

SEQ ID NO: 845 - RNA, 19 nt, Artificial Sequence
  Description of Artificial Sequence:  siNA antisense region
cauuuucauggacaggaau

SEQ ID NO: 846 - RNA, 19 nt, Artificial Sequence
  Description of Artificial Sequence:  siNA antisense region
ucuacacuggauaauuugc

SEQ ID NO: 847 - RNA, 19 nt, Artificial Sequence
  Description of Artificial Sequence:  siNA antisense region
gggugauggucaaauauau

SEQ ID NO: 848 - RNA, 19 nt, Artificial Sequence
  Description of Artificial Sequence:  siNA antisense region
aacuagccaauauccauag

SEQ ID NO: 849 - RNA, 19 nt, Artificial Sequence
  Description of Artificial Sequence:  siNA antisense region
uuugcuuaauaaaggcaaa

SEQ ID NO: 850 - RNA, 19 nt, Artificial Sequence
  Description of Artificial Sequence:  siNA antisense region
cauucaggcugaaaugaau

SEQ ID NO: 851 - RNA, 19 nt, Artificial Sequence
  Description of Artificial Sequence:  siNA antisense region
agagaauauauaggcagac

SEQ ID NO: 852 - RNA, 19 nt, Artificial Sequence
  Description of Artificial Sequence:  siNA antisense region
aaggagaauacaaagagca

SEQ ID NO: 853 - RNA, 19 nt, Artificial Sequence
  Description of Artificial Sequence:  siNA antisense region
gauguuuuaacggguucaa

SEQ ID NO: 854 - RNA, 19 nt, Artificial Sequence
  Description of Artificial Sequence:  siNA antisense region
gagugccacaggauguuuu

SEQ ID NO: 855 - RNA, 19 nt, Artificial Sequence
  Description of Artificial Sequence:  Target Sequence/siNA sense region
acugagucccgggaccccg

SEQ ID NO: 856 - RNA, 19 nt, Artificial Sequence
  Description of Artificial Sequence:  Target Sequence/siNA sense region
gggagagcggucagugugu

SEQ ID NO: 857 - RNA, 19 nt, Artificial Sequence
  Description of Artificial Sequence:  Target Sequence/siNA sense region
uggucgcugcguuuccucu

SEQ ID NO: 858 - RNA, 19 nt, Artificial Sequence
  Description of Artificial Sequence:  Target Sequence/siNA sense region
ugccugcgccgggcaucac

SEQ ID NO: 859 - RNA, 19 nt, Artificial Sequence
  Description of Artificial Sequence:  Target Sequence/siNA sense region
cuugcgcgccgcagaaagu

SEQ ID NO: 860 - RNA, 19 nt, Artificial Sequence
  Description of Artificial Sequence:  Target Sequence/siNA sense region
uccgucuggcagccuggau

SEQ ID NO: 861 - RNA, 19 nt, Artificial Sequence
  Description of Artificial Sequence:  Target Sequence/siNA sense region
uauccucuccuaccggcac

SEQ ID NO: 862 - RNA, 19 nt, Artificial Sequence
  Description of Artificial Sequence:  Target Sequence/siNA sense region
cccgcagacgccccugcag

SEQ ID NO: 863 - RNA, 19 nt, Artificial Sequence
  Description of Artificial Sequence:  Target Sequence/siNA sense region
gccgccggucggcgcccgg

SEQ ID NO: 864 - RNA, 19 nt, Artificial Sequence
  Description of Artificial Sequence:  Target Sequence/siNA sense region
ggcucccuagcccugugcg

SEQ ID NO: 865 - RNA, 19 nt, Artificial Sequence
  Description of Artificial Sequence:  Target Sequence/siNA sense region
gcucaacuguccugcgcug

SEQ ID NO: 866 - RNA, 19 nt, Artificial Sequence
  Description of Artificial Sequence:  Target Sequence/siNA sense region
gcggggugccgcgaguucc

SEQ ID NO: 867 - RNA, 19 nt, Artificial Sequence
  Description of Artificial Sequence:  Target Sequence/siNA sense region
caccuccgcgccuccuucu

SEQ ID NO: 868 - RNA, 19 nt, Artificial Sequence
  Description of Artificial Sequence:  Target Sequence/siNA sense region
ucuagacaggcgcugggag

SEQ ID NO: 869 - RNA, 19 nt, Artificial Sequence
  Description of Artificial Sequence:  Target Sequence/siNA sense region
gaaagaaccggcucccgag

SEQ ID NO: 870 - RNA, 19 nt, Artificial Sequence
  Description of Artificial Sequence:  Target Sequence/siNA sense region
guucugggcauuucgcccg

SEQ ID NO: 871 - RNA, 19 nt, Artificial Sequence
  Description of Artificial Sequence:  Target Sequence/siNA sense region
ggcucgaggugcaggaugc

SEQ ID NO: 872 - RNA, 19 nt, Artificial Sequence
  Description of Artificial Sequence:  Target Sequence/siNA sense region
cagagcaaggugcugcugg

SEQ ID NO: 873 - RNA, 19 nt, Artificial Sequence
  Description of Artificial Sequence:  Target Sequence/siNA sense region
gccgucgcccuguggcucu

SEQ ID NO: 874 - RNA, 19 nt, Artificial Sequence
  Description of Artificial Sequence:  Target Sequence/siNA sense region
ugcguggagacccgggccg

SEQ ID NO: 875 - RNA, 19 nt, Artificial Sequence
  Description of Artificial Sequence:  Target Sequence/siNA sense region
gccucuguggguuugccua

SEQ ID NO: 876 - RNA, 19 nt, Artificial Sequence
  Description of Artificial Sequence:  Target Sequence/siNA sense region
aguguuucucuugaucugc

SEQ ID NO: 877 - RNA, 19 nt, Artificial Sequence
  Description of Artificial Sequence:  Target Sequence/siNA sense region
cccaggcucagcauacaaa

SEQ ID NO: 878 - RNA, 19 nt, Artificial Sequence
  Description of Artificial Sequence:  Target Sequence/siNA sense region
aaagacauacuuacaauua

SEQ ID NO: 879 - RNA, 19 nt, Artificial Sequence
  Description of Artificial Sequence:  Target Sequence/siNA sense region
aaggcuaauacaacucuuc

SEQ ID NO: 880 - RNA, 19 nt, Artificial Sequence
  Description of Artificial Sequence:  Target Sequence/siNA sense region
caaauuacuugcaggggac

SEQ ID NO: 881 - RNA, 19 nt, Artificial Sequence
  Description of Artificial Sequence:  Target Sequence/siNA sense region
cagagggacuuggacuggc

SEQ ID NO: 882 - RNA, 19 nt, Artificial Sequence
  Description of Artificial Sequence:  Target Sequence/siNA sense region
cuuuggcccaauaaucaga

SEQ ID NO: 883 - RNA, 19 nt, Artificial Sequence
  Description of Artificial Sequence:  Target Sequence/siNA sense region
aguggcagugagcaaaggg

SEQ ID NO: 884 - RNA, 19 nt, Artificial Sequence
  Description of Artificial Sequence:  Target Sequence/siNA sense region
guggaggugacugagugca

SEQ ID NO: 885 - RNA, 19 nt, Artificial Sequence
  Description of Artificial Sequence:  Target Sequence/siNA sense region
agcgauggccucuucugua

SEQ ID NO: 886 - RNA, 19 nt, Artificial Sequence
  Description of Artificial Sequence:  Target Sequence/siNA sense region
aagacacucacaauuccaa

SEQ ID NO: 887 - RNA, 19 nt, Artificial Sequence
  Description of Artificial Sequence:  Target Sequence/siNA sense region
aaagugaucggaaaugaca

SEQ ID NO: 888 - RNA, 19 nt, Artificial Sequence
  Description of Artificial Sequence:  Target Sequence/siNA sense region
acuggagccuacaagugcu

SEQ ID NO: 889 - RNA, 19 nt, Artificial Sequence
  Description of Artificial Sequence:  Target Sequence/siNA sense region
uucuaccgggaaacugacu

SEQ ID NO: 890 - RNA, 19 nt, Artificial Sequence
  Description of Artificial Sequence:  Target Sequence/siNA sense region
uuggccucggucauuuaug

SEQ ID NO: 891 - RNA, 19 nt, Artificial Sequence
  Description of Artificial Sequence:  Target Sequence/siNA sense region
gucuauguucaagauuaca

SEQ ID NO: 892 - RNA, 19 nt, Artificial Sequence
  Description of Artificial Sequence:  Target Sequence/siNA sense region
agaucuccauuuauugcuu

SEQ ID NO: 893 - RNA, 19 nt, Artificial Sequence
  Description of Artificial Sequence:  Target Sequence/siNA sense region
ucuguuagugaccaacaug

SEQ ID NO: 894 - RNA, 19 nt, Artificial Sequence
  Description of Artificial Sequence:  Target Sequence/siNA sense region
ggagucguguacauuacug

SEQ ID NO: 895 - RNA, 19 nt, Artificial Sequence
  Description of Artificial Sequence:  Target Sequence/siNA sense region
gagaacaaaaacaaaacug

SEQ ID NO: 896 - RNA, 19 nt, Artificial Sequence
  Description of Artificial Sequence:  Target Sequence/siNA sense region
guggugauuccaugucucg

SEQ ID NO: 897 - RNA, 19 nt, Artificial Sequence
  Description of Artificial Sequence:  Target Sequence/siNA sense region
ggguccauuucaaaucuca

SEQ ID NO: 898 - RNA, 19 nt, Artificial Sequence
  Description of Artificial Sequence:  Target Sequence/siNA sense region
aacgugucacuuugugcaa

SEQ ID NO: 899 - RNA, 19 nt, Artificial Sequence
  Description of Artificial Sequence:  Target Sequence/siNA sense region
agauacccagaaaagagau

SEQ ID NO: 900 - RNA, 19 nt, Artificial Sequence
  Description of Artificial Sequence:  Target Sequence/siNA sense region
uuuguuccugaugguaaca

SEQ ID NO: 901 - RNA, 19 nt, Artificial Sequence
  Description of Artificial Sequence:  Target Sequence/siNA sense region
agaauuuccugggacagca

SEQ ID NO: 902 - RNA, 19 nt, Artificial Sequence
  Description of Artificial Sequence:  Target Sequence/siNA sense region
aagaagggcuuuacuauuc

SEQ ID NO: 903 - RNA, 19 nt, Artificial Sequence
  Description of Artificial Sequence:  Target Sequence/siNA sense region
cccagcuacaugaucagcu

SEQ ID NO: 904 - RNA, 19 nt, Artificial Sequence
  Description of Artificial Sequence:  Target Sequence/siNA sense region
uaugcuggcauggucuucu

SEQ ID NO: 905 - RNA, 19 nt, Artificial Sequence
  Description of Artificial Sequence:  Target Sequence/siNA sense region
ugugaagcaaaaauuaaug

SEQ ID NO: 906 - RNA, 19 nt, Artificial Sequence
  Description of Artificial Sequence:  Target Sequence/siNA sense region
gaugaaaguuaccagucua

SEQ ID NO: 907 - RNA, 19 nt, Artificial Sequence
  Description of Artificial Sequence:  Target Sequence/siNA sense region
auuauguacauaguugucg

SEQ ID NO: 908 - RNA, 19 nt, Artificial Sequence
  Description of Artificial Sequence:  Target Sequence/siNA sense region
guuguaggguauaggauuu

SEQ ID NO: 909 - RNA, 19 nt, Artificial Sequence
  Description of Artificial Sequence:  Target Sequence/siNA sense region
uaugaugugguucugaguc

SEQ ID NO: 910 - RNA, 19 nt, Artificial Sequence
  Description of Artificial Sequence:  Target Sequence/siNA sense region
ccgucucauggaauugaac

SEQ ID NO: 911 - RNA, 19 nt, Artificial Sequence
  Description of Artificial Sequence:  Target Sequence/siNA sense region
cuaucuguuggagaaaagc

SEQ ID NO: 912 - RNA, 19 nt, Artificial Sequence
  Description of Artificial Sequence:  Target Sequence/siNA sense region
cuugucuuaaauuguacag

SEQ ID NO: 913 - RNA, 19 nt, Artificial Sequence
  Description of Artificial Sequence:  Target Sequence/siNA sense region
gcaagaacugaacuaaaug

SEQ ID NO: 914 - RNA, 19 nt, Artificial Sequence
  Description of Artificial Sequence:  Target Sequence/siNA sense region
guggggauugacuucaacu

SEQ ID NO: 915 - RNA, 19 nt, Artificial Sequence
  Description of Artificial Sequence:  Target Sequence/siNA sense region
ugggaauacccuucuucga

SEQ ID NO: 916 - RNA, 19 nt, Artificial Sequence
  Description of Artificial Sequence:  Target Sequence/siNA sense region
aagcaucagcauaagaaac

SEQ ID NO: 917 - RNA, 19 nt, Artificial Sequence
  Description of Artificial Sequence:  Target Sequence/siNA sense region
cuuguaaaccgagaccuaa

SEQ ID NO: 918 - RNA, 19 nt, Artificial Sequence
  Description of Artificial Sequence:  Target Sequence/siNA sense region
aaaacccagucugggagug

SEQ ID NO: 919 - RNA, 19 nt, Artificial Sequence
  Description of Artificial Sequence:  Target Sequence/siNA sense region
gagaugaagaaauuuuuga

SEQ ID NO: 920 - RNA, 19 nt, Artificial Sequence
  Description of Artificial Sequence:  Target Sequence/siNA sense region
agcaccuuaacuauagaug

SEQ ID NO: 921 - RNA, 19 nt, Artificial Sequence
  Description of Artificial Sequence:  Target Sequence/siNA sense region
gguguaacccggagugacc

SEQ ID NO: 922 - RNA, 19 nt, Artificial Sequence
  Description of Artificial Sequence:  Target Sequence/siNA sense region
caaggauuguacaccugug

SEQ ID NO: 923 - RNA, 19 nt, Artificial Sequence
  Description of Artificial Sequence:  Target Sequence/siNA sense region
gcagcauccagugggcuga

SEQ ID NO: 924 - RNA, 19 nt, Artificial Sequence
  Description of Artificial Sequence:  Target Sequence/siNA sense region
augaccaagaagaacagca

SEQ ID NO: 925 - RNA, 19 nt, Artificial Sequence
  Description of Artificial Sequence:  Target Sequence/siNA sense region
acauuugucaggguccaug

SEQ ID NO: 926 - RNA, 19 nt, Artificial Sequence
  Description of Artificial Sequence:  Target Sequence/siNA sense region
gaaaaaccuuuuguugcuu

SEQ ID NO: 927 - RNA, 19 nt, Artificial Sequence
  Description of Artificial Sequence:  Target Sequence/siNA sense region
uuuggaaguggcauggaau

SEQ ID NO: 928 - RNA, 19 nt, Artificial Sequence
  Description of Artificial Sequence:  Target Sequence/siNA sense region
ucucugguggaagccacgg

SEQ ID NO: 929 - RNA, 19 nt, Artificial Sequence
  Description of Artificial Sequence:  Target Sequence/siNA sense region
gugggggagcgugucagaa

SEQ ID NO: 930 - RNA, 19 nt, Artificial Sequence
  Description of Artificial Sequence:  Target Sequence/siNA sense region
aucccugcgaaguaccuug

SEQ ID NO: 931 - RNA, 19 nt, Artificial Sequence
  Description of Artificial Sequence:  Target Sequence/siNA sense region
gguuacccacccccagaaa

SEQ ID NO: 932 - RNA, 19 nt, Artificial Sequence
  Description of Artificial Sequence:  Target Sequence/siNA sense region
auaaaaugguauaaaaaug

SEQ ID NO: 933 - RNA, 19 nt, Artificial Sequence
  Description of Artificial Sequence:  Target Sequence/siNA sense region
ggaauaccccuugagucca

SEQ ID NO: 934 - RNA, 19 nt, Artificial Sequence
  Description of Artificial Sequence:  Target Sequence/siNA sense region
aaucacacaauuaaagcgg

SEQ ID NO: 935 - RNA, 19 nt, Artificial Sequence
  Description of Artificial Sequence:  Target Sequence/siNA sense region
gggcauguacugacgauua

SEQ ID NO: 936 - RNA, 19 nt, Artificial Sequence
  Description of Artificial Sequence:  Target Sequence/siNA sense region
auggaagugagugaaagag

SEQ ID NO: 937 - RNA, 19 nt, Artificial Sequence
  Description of Artificial Sequence:  Target Sequence/siNA sense region
gacacaggaaauuacacug

SEQ ID NO: 938 - RNA, 19 nt, Artificial Sequence
  Description of Artificial Sequence:  Target Sequence/siNA sense region
gucauccuuaccaauccca

SEQ ID NO: 939 - RNA, 19 nt, Artificial Sequence
  Description of Artificial Sequence:  Target Sequence/siNA sense region
auuucaaaggagaagcaga

SEQ ID NO: 940 - RNA, 19 nt, Artificial Sequence
  Description of Artificial Sequence:  Target Sequence/siNA sense region
agccauguggucucucugg

SEQ ID NO: 941 - RNA, 19 nt, Artificial Sequence
  Description of Artificial Sequence:  Target Sequence/siNA sense region
guuguguaugucccacccc

SEQ ID NO: 942 - RNA, 19 nt, Artificial Sequence
  Description of Artificial Sequence:  Target Sequence/siNA sense region
cagauuggugagaaaucuc

SEQ ID NO: 943 - RNA, 19 nt, Artificial Sequence
  Description of Artificial Sequence:  Target Sequence/siNA sense region
cuaaucucuccuguggauu

SEQ ID NO: 944 - RNA, 19 nt, Artificial Sequence
  Description of Artificial Sequence:  Target Sequence/siNA sense region
uccuaccaguacggcacca

SEQ ID NO: 945 - RNA, 19 nt, Artificial Sequence
  Description of Artificial Sequence:  Target Sequence/siNA sense region
acucaaacgcugacaugua

SEQ ID NO: 946 - RNA, 19 nt, Artificial Sequence
  Description of Artificial Sequence:  Target Sequence/siNA sense region
acggucuaugccauuccuc

SEQ ID NO: 947 - RNA, 19 nt, Artificial Sequence
  Description of Artificial Sequence:  Target Sequence/siNA sense region
cccccgcaucacauccacu

SEQ ID NO: 948 - RNA, 19 nt, Artificial Sequence
  Description of Artificial Sequence:  Target Sequence/siNA sense region
ugguauuggcaguuggagg

SEQ ID NO: 949 - RNA, 19 nt, Artificial Sequence
  Description of Artificial Sequence:  Target Sequence/siNA sense region
gaagagugcgccaacgagc

SEQ ID NO: 950 - RNA, 19 nt, Artificial Sequence
  Description of Artificial Sequence:  Target Sequence/siNA sense region
cccagccaagcugucucag

SEQ ID NO: 951 - RNA, 19 nt, Artificial Sequence
  Description of Artificial Sequence:  Target Sequence/siNA sense region
gugacaaacccauacccuu

SEQ ID NO: 952 - RNA, 19 nt, Artificial Sequence
  Description of Artificial Sequence:  Target Sequence/siNA sense region
ugugaagaauggagaagug

SEQ ID NO: 953 - RNA, 19 nt, Artificial Sequence
  Description of Artificial Sequence:  Target Sequence/siNA sense region
guggaggacuuccagggag

SEQ ID NO: 954 - RNA, 19 nt, Artificial Sequence
  Description of Artificial Sequence:  Target Sequence/siNA sense region
ggaaauaaaauugaaguua

SEQ ID NO: 955 - RNA, 19 nt, Artificial Sequence
  Description of Artificial Sequence:  Target Sequence/siNA sense region
aauaaaaaucaauuugcuc

SEQ ID NO: 956 - RNA, 19 nt, Artificial Sequence
  Description of Artificial Sequence:  Target Sequence/siNA sense region
cuaauugaaggaaaaaaca

SEQ ID NO: 957 - RNA, 19 nt, Artificial Sequence
  Description of Artificial Sequence:  Target Sequence/siNA sense region
aaaacuguaaguacccuug

SEQ ID NO: 958 - RNA, 19 nt, Artificial Sequence
  Description of Artificial Sequence:  Target Sequence/siNA sense region
guuauccaagcggcaaaug

SEQ ID NO: 959 - RNA, 19 nt, Artificial Sequence
  Description of Artificial Sequence:  Target Sequence/siNA sense region
gugucagcuuuguacaaau

SEQ ID NO: 960 - RNA, 19 nt, Artificial Sequence
  Description of Artificial Sequence:  Target Sequence/siNA sense region
ugugaagcggucaacaaag

SEQ ID NO: 961 - RNA, 19 nt, Artificial Sequence
  Description of Artificial Sequence:  Target Sequence/siNA sense region
gucgggagaggagagaggg

SEQ ID NO: 962 - RNA, 19 nt, Artificial Sequence
  Description of Artificial Sequence:  Target Sequence/siNA sense region
gugaucuccuuccacguga

SEQ ID NO: 963 - RNA, 19 nt, Artificial Sequence
  Description of Artificial Sequence:  Target Sequence/siNA sense region
accagggguccugaaauua

SEQ ID NO: 964 - RNA, 19 nt, Artificial Sequence
  Description of Artificial Sequence:  Target Sequence/siNA sense region
acuuugcaaccugacaugc

SEQ ID NO: 965 - RNA, 19 nt, Artificial Sequence
  Description of Artificial Sequence:  Target Sequence/siNA sense region
cagcccacugagcaggaga

SEQ ID NO: 966 - RNA, 19 nt, Artificial Sequence
  Description of Artificial Sequence:  Target Sequence/siNA sense region
agcgugucuuuguggugca

SEQ ID NO: 967 - RNA, 19 nt, Artificial Sequence
  Description of Artificial Sequence:  Target Sequence/siNA sense region
acugcagacagaucuacgu

SEQ ID NO: 968 - RNA, 19 nt, Artificial Sequence
  Description of Artificial Sequence:  Target Sequence/siNA sense region
uuugagaaccucacauggu

SEQ ID NO: 969 - RNA, 19 nt, Artificial Sequence
  Description of Artificial Sequence:  Target Sequence/siNA sense region
uacaagcuuggcccacagc

SEQ ID NO: 970 - RNA, 19 nt, Artificial Sequence
  Description of Artificial Sequence:  Target Sequence/siNA sense region
ccucugccaauccaugugg

SEQ ID NO: 971 - RNA, 19 nt, Artificial Sequence
  Description of Artificial Sequence:  Target Sequence/siNA sense region
ggagaguugcccacaccug

SEQ ID NO: 972 - RNA, 19 nt, Artificial Sequence
  Description of Artificial Sequence:  Target Sequence/siNA sense region
guuugcaagaacuuggaua

SEQ ID NO: 973 - RNA, 19 nt, Artificial Sequence
  Description of Artificial Sequence:  Target Sequence/siNA sense region
acucuuuggaaauugaaug

SEQ ID NO: 974 - RNA, 19 nt, Artificial Sequence
  Description of Artificial Sequence:  Target Sequence/siNA sense region
gccaccauguucucuaaua

SEQ ID NO: 975 - RNA, 19 nt, Artificial Sequence
  Description of Artificial Sequence:  Target Sequence/siNA sense region
agcacaaaugacauuuuga

SEQ ID NO: 976 - RNA, 19 nt, Artificial Sequence
  Description of Artificial Sequence:  Target Sequence/siNA sense region
aucauggagcuuaagaaug

SEQ ID NO: 977 - RNA, 19 nt, Artificial Sequence
  Description of Artificial Sequence:  Target Sequence/siNA sense region
gcauccuugcaggaccaag

SEQ ID NO: 978 - RNA, 19 nt, Artificial Sequence
  Description of Artificial Sequence:  Target Sequence/siNA sense region
ggagacuaugucugccuug

SEQ ID NO: 979 - RNA, 19 nt, Artificial Sequence
  Description of Artificial Sequence:  Target Sequence/siNA sense region
gcucaagacaggaagacca

SEQ ID NO: 980 - RNA, 19 nt, Artificial Sequence
  Description of Artificial Sequence:  Target Sequence/siNA sense region
aagaaaagacauugcgugg

SEQ ID NO: 981 - RNA, 19 nt, Artificial Sequence
  Description of Artificial Sequence:  Target Sequence/siNA sense region
gucaggcagcucacagucc

SEQ ID NO: 982 - RNA, 19 nt, Artificial Sequence
  Description of Artificial Sequence:  Target Sequence/siNA sense region
cuagagcguguggcaccca

SEQ ID NO: 983 - RNA, 19 nt, Artificial Sequence
  Description of Artificial Sequence:  Target Sequence/siNA sense region
acgaucacaggaaaccugg

SEQ ID NO: 984 - RNA, 19 nt, Artificial Sequence
  Description of Artificial Sequence:  Target Sequence/siNA sense region
gagaaucagacgacaagua

SEQ ID NO: 985 - RNA, 19 nt, Artificial Sequence
  Description of Artificial Sequence:  Target Sequence/siNA sense region
auuggggaaagcaucgaag

SEQ ID NO: 986 - RNA, 19 nt, Artificial Sequence
  Description of Artificial Sequence:  Target Sequence/siNA sense region
gucucaugcacggcaucug

SEQ ID NO: 987 - RNA, 19 nt, Artificial Sequence
  Description of Artificial Sequence:  Target Sequence/siNA sense region
gggaaucccccuccacaga

SEQ ID NO: 988 - RNA, 19 nt, Artificial Sequence
  Description of Artificial Sequence:  Target Sequence/siNA sense region
aucaugugguuuaaagaua

SEQ ID NO: 989 - RNA, 19 nt, Artificial Sequence
  Description of Artificial Sequence:  Target Sequence/siNA sense region
aaugagacccuuguagaag

SEQ ID NO: 990 - RNA, 19 nt, Artificial Sequence
  Description of Artificial Sequence:  Target Sequence/siNA sense region
gacucaggcauuguauuga

SEQ ID NO: 991 - RNA, 19 nt, Artificial Sequence
  Description of Artificial Sequence:  Target Sequence/siNA sense region
aaggaugggaaccggaacc

SEQ ID NO: 992 - RNA, 19 nt, Artificial Sequence
  Description of Artificial Sequence:  Target Sequence/siNA sense region
cucacuauccgcagaguga

SEQ ID NO: 993 - RNA, 19 nt, Artificial Sequence
  Description of Artificial Sequence:  Target Sequence/siNA sense region
aggaaggaggacgaaggcc

SEQ ID NO: 994 - RNA, 19 nt, Artificial Sequence
  Description of Artificial Sequence:  Target Sequence/siNA sense region
cucuacaccugccaggcau

SEQ ID NO: 995 - RNA, 19 nt, Artificial Sequence
  Description of Artificial Sequence:  Target Sequence/siNA sense region
ugcaguguucuuggcugug

SEQ ID NO: 996 - RNA, 19 nt, Artificial Sequence
  Description of Artificial Sequence:  Target Sequence/siNA sense region
gcaaaaguggaggcauuuu

SEQ ID NO: 997 - RNA, 19 nt, Artificial Sequence
  Description of Artificial Sequence:  Target Sequence/siNA sense region
uucauaauagaaggugccc

SEQ ID NO: 998 - RNA, 19 nt, Artificial Sequence
  Description of Artificial Sequence:  Target Sequence/siNA sense region
caggaaaagacgaacuugg

SEQ ID NO: 999 - RNA, 19 nt, Artificial Sequence
  Description of Artificial Sequence:  Target Sequence/siNA sense region
gaaaucauuauucuaguag

SEQ ID NO: 1000 - RNA, 19 nt, Artificial Sequence
  Description of Artificial Sequence:  Target Sequence/siNA sense region
ggcacggcggugauugcca

SEQ ID NO: 1001 - RNA, 19 nt, Artificial Sequence
  Description of Artificial Sequence:  Target Sequence/siNA sense region
auguucuucuggcuacuuc

SEQ ID NO: 1002 - RNA, 19 nt, Artificial Sequence
  Description of Artificial Sequence:  Target Sequence/siNA sense region
cuugucaucauccuacgga

SEQ ID NO: 1003 - RNA, 19 nt, Artificial Sequence
  Description of Artificial Sequence:  Target Sequence/siNA sense region
accguuaagcgggccaaug

SEQ ID NO: 1004 - RNA, 19 nt, Artificial Sequence
  Description of Artificial Sequence:  Target Sequence/siNA sense region
ggaggggaacugaagacag

SEQ ID NO: 1005 - RNA, 19 nt, Artificial Sequence
  Description of Artificial Sequence:  Target Sequence/siNA sense region
ggcuacuuguccaucguca

SEQ ID NO: 1006 - RNA, 19 nt, Artificial Sequence
  Description of Artificial Sequence:  Target Sequence/siNA sense region
auggauccagaugaacucc

SEQ ID NO: 1007 - RNA, 19 nt, Artificial Sequence
  Description of Artificial Sequence:  Target Sequence/siNA sense region
ccauuggaugaacauugug

SEQ ID NO: 1008 - RNA, 19 nt, Artificial Sequence
  Description of Artificial Sequence:  Target Sequence/siNA sense region
gaacgacugccuuaugaug

SEQ ID NO: 1009 - RNA, 19 nt, Artificial Sequence
  Description of Artificial Sequence:  Target Sequence/siNA sense region
gccagcaaaugggaauucc

SEQ ID NO: 1010 - RNA, 19 nt, Artificial Sequence
  Description of Artificial Sequence:  Target Sequence/siNA sense region
cccagagaccggcugaagc

SEQ ID NO: 1011 - RNA, 19 nt, Artificial Sequence
  Description of Artificial Sequence:  Target Sequence/siNA sense region
cuagguaagccucuuggcc

SEQ ID NO: 1012 - RNA, 19 nt, Artificial Sequence
  Description of Artificial Sequence:  Target Sequence/siNA sense region
cguggugccuuuggccaag

SEQ ID NO: 1013 - RNA, 19 nt, Artificial Sequence
  Description of Artificial Sequence:  Target Sequence/siNA sense region
gugauugaagcagaugccu

SEQ ID NO: 1014 - RNA, 19 nt, Artificial Sequence
  Description of Artificial Sequence:  Target Sequence/siNA sense region
uuuggaauugacaagacag

SEQ ID NO: 1015 - RNA, 19 nt, Artificial Sequence
  Description of Artificial Sequence:  Target Sequence/siNA sense region
gcaacuugcaggacaguag

SEQ ID NO: 1016 - RNA, 19 nt, Artificial Sequence
  Description of Artificial Sequence:  Target Sequence/siNA sense region
gcagucaaaauguugaaag

SEQ ID NO: 1017 - RNA, 19 nt, Artificial Sequence
  Description of Artificial Sequence:  Target Sequence/siNA sense region
gaaggagcaacacacagug

SEQ ID NO: 1018 - RNA, 19 nt, Artificial Sequence
  Description of Artificial Sequence:  Target Sequence/siNA sense region
gagcaucgagcucucaugu

SEQ ID NO: 1019 - RNA, 19 nt, Artificial Sequence
  Description of Artificial Sequence:  Target Sequence/siNA sense region
ucugaacucaagauccuca

SEQ ID NO: 1020 - RNA, 19 nt, Artificial Sequence
  Description of Artificial Sequence:  Target Sequence/siNA sense region
auucauauuggucaccauc

SEQ ID NO: 1021 - RNA, 19 nt, Artificial Sequence
  Description of Artificial Sequence:  Target Sequence/siNA sense region
cucaauguggucaaccuuc

SEQ ID NO: 1022 - RNA, 19 nt, Artificial Sequence
  Description of Artificial Sequence:  Target Sequence/siNA sense region
cuaggugccuguaccaagc

SEQ ID NO: 1023 - RNA, 19 nt, Artificial Sequence
  Description of Artificial Sequence:  Target Sequence/siNA sense region
ccaggagggccacucaugg

SEQ ID NO: 1024 - RNA, 19 nt, Artificial Sequence
  Description of Artificial Sequence:  Target Sequence/siNA sense region
gugauuguggaauucugca

SEQ ID NO: 1025 - RNA, 19 nt, Artificial Sequence
  Description of Artificial Sequence:  Target Sequence/siNA sense region
aaauuuggaaaccugucca

SEQ ID NO: 1026 - RNA, 19 nt, Artificial Sequence
  Description of Artificial Sequence:  Target Sequence/siNA sense region
acuuaccugaggagcaaga

SEQ ID NO: 1027 - RNA, 19 nt, Artificial Sequence
  Description of Artificial Sequence:  Target Sequence/siNA sense region
agaaaugaauuuguccccu

SEQ ID NO: 1028 - RNA, 19 nt, Artificial Sequence
  Description of Artificial Sequence:  Target Sequence/siNA sense region
uacaagaccaaaggggcac

SEQ ID NO: 1029 - RNA, 19 nt, Artificial Sequence
  Description of Artificial Sequence:  Target Sequence/siNA sense region
cgauuccgucaagggaaag

SEQ ID NO: 1030 - RNA, 19 nt, Artificial Sequence
  Description of Artificial Sequence:  Target Sequence/siNA sense region
gacuacguuggagcaaucc

SEQ ID NO: 1031 - RNA, 19 nt, Artificial Sequence
  Description of Artificial Sequence:  Target Sequence/siNA sense region
ccuguggaucugaaacggc

SEQ ID NO: 1032 - RNA, 19 nt, Artificial Sequence
  Description of Artificial Sequence:  Target Sequence/siNA sense region
cgcuuggacagcaucacca

SEQ ID NO: 1033 - RNA, 19 nt, Artificial Sequence
  Description of Artificial Sequence:  Target Sequence/siNA sense region
aguagccagagcucagcca

SEQ ID NO: 1034 - RNA, 19 nt, Artificial Sequence
  Description of Artificial Sequence:  Target Sequence/siNA sense region
agcucuggauuuguggagg

SEQ ID NO: 1035 - RNA, 19 nt, Artificial Sequence
  Description of Artificial Sequence:  Target Sequence/siNA sense region
gagaagucccucagugaug

SEQ ID NO: 1036 - RNA, 19 nt, Artificial Sequence
  Description of Artificial Sequence:  Target Sequence/siNA sense region
guagaagaagaggaagcuc

SEQ ID NO: 1037 - RNA, 19 nt, Artificial Sequence
  Description of Artificial Sequence:  Target Sequence/siNA sense region
ccugaagaucuguauaagg

SEQ ID NO: 1038 - RNA, 19 nt, Artificial Sequence
  Description of Artificial Sequence:  Target Sequence/siNA sense region
gacuuccugaccuuggagc

SEQ ID NO: 1039 - RNA, 19 nt, Artificial Sequence
  Description of Artificial Sequence:  Target Sequence/siNA sense region
caucucaucuguuacagcu

SEQ ID NO: 1040 - RNA, 19 nt, Artificial Sequence
  Description of Artificial Sequence:  Target Sequence/siNA sense region
uuccaaguggcuaagggca

SEQ ID NO: 1041 - RNA, 19 nt, Artificial Sequence
  Description of Artificial Sequence:  Target Sequence/siNA sense region
auggaguucuuggcaucgc

SEQ ID NO: 1042 - RNA, 19 nt, Artificial Sequence
  Description of Artificial Sequence:  Target Sequence/siNA sense region
cgaaaguguauccacaggg

SEQ ID NO: 1043 - RNA, 19 nt, Artificial Sequence
  Description of Artificial Sequence:  Target Sequence/siNA sense region
gaccuggcggcacgaaaua

SEQ ID NO: 1044 - RNA, 19 nt, Artificial Sequence
  Description of Artificial Sequence:  Target Sequence/siNA sense region
auccucuuaucggagaaga

SEQ ID NO: 1045 - RNA, 19 nt, Artificial Sequence
  Description of Artificial Sequence:  Target Sequence/siNA sense region
aacgugguuaaaaucugug

SEQ ID NO: 1046 - RNA, 19 nt, Artificial Sequence
  Description of Artificial Sequence:  Target Sequence/siNA sense region
gacuuuggcuuggcccggg

SEQ ID NO: 1047 - RNA, 19 nt, Artificial Sequence
  Description of Artificial Sequence:  Target Sequence/siNA sense region
gauauuuauaaagauccag

SEQ ID NO: 1048 - RNA, 19 nt, Artificial Sequence
  Description of Artificial Sequence:  Target Sequence/siNA sense region
gauuaugucagaaaaggag

SEQ ID NO: 1049 - RNA, 19 nt, Artificial Sequence
  Description of Artificial Sequence:  Target Sequence/siNA sense region
gaugcucgccucccuuuga

SEQ ID NO: 1050 - RNA, 19 nt, Artificial Sequence
  Description of Artificial Sequence:  Target Sequence/siNA sense region
aaauggauggccccagaaa

SEQ ID NO: 1051 - RNA, 19 nt, Artificial Sequence
  Description of Artificial Sequence:  Target Sequence/siNA sense region
acaauuuuugacagagugu

SEQ ID NO: 1052 - RNA, 19 nt, Artificial Sequence
  Description of Artificial Sequence:  Target Sequence/siNA sense region
uacacaauccagagugacg

SEQ ID NO: 1053 - RNA, 19 nt, Artificial Sequence
  Description of Artificial Sequence:  Target Sequence/siNA sense region
gucuggucuuuugguguuu

SEQ ID NO: 1054 - RNA, 19 nt, Artificial Sequence
  Description of Artificial Sequence:  Target Sequence/siNA sense region
uugcugugggaaauauuuu

SEQ ID NO: 1055 - RNA, 19 nt, Artificial Sequence
  Description of Artificial Sequence:  Target Sequence/siNA sense region
uccuuaggugcuucuccau

SEQ ID NO: 1056 - RNA, 19 nt, Artificial Sequence
  Description of Artificial Sequence:  Target Sequence/siNA sense region
uauccugggguaaagauug

SEQ ID NO: 1057 - RNA, 19 nt, Artificial Sequence
  Description of Artificial Sequence:  Target Sequence/siNA sense region
gaugaagaauuuuguaggc

SEQ ID NO: 1058 - RNA, 19 nt, Artificial Sequence
  Description of Artificial Sequence:  Target Sequence/siNA sense region
cgauugaaagaaggaacua

SEQ ID NO: 1059 - RNA, 19 nt, Artificial Sequence
  Description of Artificial Sequence:  Target Sequence/siNA sense region
agaaugagggccccugauu

SEQ ID NO: 1060 - RNA, 19 nt, Artificial Sequence
  Description of Artificial Sequence:  Target Sequence/siNA sense region
uauacuacaccagaaaugu

SEQ ID NO: 1061 - RNA, 19 nt, Artificial Sequence
  Description of Artificial Sequence:  Target Sequence/siNA sense region
uaccagaccaugcuggacu

SEQ ID NO: 1062 - RNA, 19 nt, Artificial Sequence
  Description of Artificial Sequence:  Target Sequence/siNA sense region
ugcuggcacggggagccca

SEQ ID NO: 1063 - RNA, 19 nt, Artificial Sequence
  Description of Artificial Sequence:  Target Sequence/siNA sense region
agucagagacccacguuuu

SEQ ID NO: 1064 - RNA, 19 nt, Artificial Sequence
  Description of Artificial Sequence:  Target Sequence/siNA sense region
ucagaguugguggaacauu

SEQ ID NO: 1065 - RNA, 19 nt, Artificial Sequence
  Description of Artificial Sequence:  Target Sequence/siNA sense region
uugggaaaucucuugcaag

SEQ ID NO: 1066 - RNA, 19 nt, Artificial Sequence
  Description of Artificial Sequence:  Target Sequence/siNA sense region
gcuaaugcucagcaggaug

SEQ ID NO: 1067 - RNA, 19 nt, Artificial Sequence
  Description of Artificial Sequence:  Target Sequence/siNA sense region
ggcaaagacuacauuguuc

SEQ ID NO: 1068 - RNA, 19 nt, Artificial Sequence
  Description of Artificial Sequence:  Target Sequence/siNA sense region
cuuccgauaucagagacuu

SEQ ID NO: 1069 - RNA, 19 nt, Artificial Sequence
  Description of Artificial Sequence:  Target Sequence/siNA sense region
uugagcauggaagaggauu

SEQ ID NO: 1070 - RNA, 19 nt, Artificial Sequence
  Description of Artificial Sequence:  Target Sequence/siNA sense region
ucuggacucucucugccua

SEQ ID NO: 1071 - RNA, 19 nt, Artificial Sequence
  Description of Artificial Sequence:  Target Sequence/siNA sense region
accucaccuguuuccugua

SEQ ID NO: 1072 - RNA, 19 nt, Artificial Sequence
  Description of Artificial Sequence:  Target Sequence/siNA sense region
auggaggaggaggaaguau

SEQ ID NO: 1073 - RNA, 19 nt, Artificial Sequence
  Description of Artificial Sequence:  Target Sequence/siNA sense region
ugugaccccaaauuccauu

SEQ ID NO: 1074 - RNA, 19 nt, Artificial Sequence
  Description of Artificial Sequence:  Target Sequence/siNA sense region
uaugacaacacagcaggaa

SEQ ID NO: 1075 - RNA, 19 nt, Artificial Sequence
  Description of Artificial Sequence:  Target Sequence/siNA sense region
aucagucaguaucugcaga

SEQ ID NO: 1076 - RNA, 19 nt, Artificial Sequence
  Description of Artificial Sequence:  Target Sequence/siNA sense region
aacaguaagcgaaagagcc

SEQ ID NO: 1077 - RNA, 19 nt, Artificial Sequence
  Description of Artificial Sequence:  Target Sequence/siNA sense region
cggccugugaguguaaaaa

SEQ ID NO: 1078 - RNA, 19 nt, Artificial Sequence
  Description of Artificial Sequence:  Target Sequence/siNA sense region
acauuugaagauaucccgu

SEQ ID NO: 1079 - RNA, 19 nt, Artificial Sequence
  Description of Artificial Sequence:  Target Sequence/siNA sense region
uuagaagaaccagaaguaa

SEQ ID NO: 1080 - RNA, 19 nt, Artificial Sequence
  Description of Artificial Sequence:  Target Sequence/siNA sense region
aaaguaaucccagaugaca

SEQ ID NO: 1081 - RNA, 19 nt, Artificial Sequence
  Description of Artificial Sequence:  Target Sequence/siNA sense region
aaccagacggacaguggua

SEQ ID NO: 1082 - RNA, 19 nt, Artificial Sequence
  Description of Artificial Sequence:  Target Sequence/siNA sense region
augguucuugccucagaag

SEQ ID NO: 1083 - RNA, 19 nt, Artificial Sequence
  Description of Artificial Sequence:  Target Sequence/siNA sense region
gagcugaaaacuuuggaag

SEQ ID NO: 1084 - RNA, 19 nt, Artificial Sequence
  Description of Artificial Sequence:  Target Sequence/siNA sense region
gacagaaccaaauuaucuc

SEQ ID NO: 1085 - RNA, 19 nt, Artificial Sequence
  Description of Artificial Sequence:  Target Sequence/siNA sense region
ccaucuuuugguggaaugg

SEQ ID NO: 1086 - RNA, 19 nt, Artificial Sequence
  Description of Artificial Sequence:  Target Sequence/siNA sense region
gugcccagcaaaagcaggg

SEQ ID NO: 1087 - RNA, 19 nt, Artificial Sequence
  Description of Artificial Sequence:  Target Sequence/siNA sense region
gagucuguggcaucugaag

SEQ ID NO: 1088 - RNA, 19 nt, Artificial Sequence
  Description of Artificial Sequence:  Target Sequence/siNA sense region
ggcucaaaccagacaagcg

SEQ ID NO: 1089 - RNA, 19 nt, Artificial Sequence
  Description of Artificial Sequence:  Target Sequence/siNA sense region
ggcuaccaguccggauauc

SEQ ID NO: 1090 - RNA, 19 nt, Artificial Sequence
  Description of Artificial Sequence:  Target Sequence/siNA sense region
cacuccgaugacacagaca

SEQ ID NO: 1091 - RNA, 19 nt, Artificial Sequence
  Description of Artificial Sequence:  Target Sequence/siNA sense region
accaccguguacuccagug

SEQ ID NO: 1092 - RNA, 19 nt, Artificial Sequence
  Description of Artificial Sequence:  Target Sequence/siNA sense region
gaggaagcagaacuuuuaa

SEQ ID NO: 1093 - RNA, 19 nt, Artificial Sequence
  Description of Artificial Sequence:  Target Sequence/siNA sense region
aagcugauagagauuggag

SEQ ID NO: 1094 - RNA, 19 nt, Artificial Sequence
  Description of Artificial Sequence:  Target Sequence/siNA sense region
gugcaaaccgguagcacag

SEQ ID NO: 1095 - RNA, 19 nt, Artificial Sequence
  Description of Artificial Sequence:  Target Sequence/siNA sense region
gcccagauucuccagccug

SEQ ID NO: 1096 - RNA, 19 nt, Artificial Sequence
  Description of Artificial Sequence:  Target Sequence/siNA sense region
gacucggggaccacacuga

SEQ ID NO: 1097 - RNA, 19 nt, Artificial Sequence
  Description of Artificial Sequence:  Target Sequence/siNA sense region
agcucuccuccuguuuaaa

SEQ ID NO: 1098 - RNA, 19 nt, Artificial Sequence
  Description of Artificial Sequence:  Target Sequence/siNA sense region
aaggaagcauccacacccc

SEQ ID NO: 1099 - RNA, 19 nt, Artificial Sequence
  Description of Artificial Sequence:  Target Sequence/siNA sense region
caacucccggacaucacau

SEQ ID NO: 1100 - RNA, 19 nt, Artificial Sequence
  Description of Artificial Sequence:  Target Sequence/siNA sense region
ugagaggucugcucagauu

SEQ ID NO: 1101 - RNA, 19 nt, Artificial Sequence
  Description of Artificial Sequence:  Target Sequence/siNA sense region
uuugaaguguuguucuuuc

SEQ ID NO: 1102 - RNA, 19 nt, Artificial Sequence
  Description of Artificial Sequence:  Target Sequence/siNA sense region
ccaccagcaggaaguagcc

SEQ ID NO: 1103 - RNA, 19 nt, Artificial Sequence
  Description of Artificial Sequence:  Target Sequence/siNA sense region
cgcauuugauuuucauuuc

SEQ ID NO: 1104 - RNA, 19 nt, Artificial Sequence
  Description of Artificial Sequence:  Target Sequence/siNA sense region
cgacaacagaaaaaggacc

SEQ ID NO: 1105 - RNA, 19 nt, Artificial Sequence
  Description of Artificial Sequence:  Target Sequence/siNA sense region
cucggacugcagggagcca

SEQ ID NO: 1106 - RNA, 19 nt, Artificial Sequence
  Description of Artificial Sequence:  Target Sequence/siNA sense region
agucuucuaggcauauccu

SEQ ID NO: 1107 - RNA, 19 nt, Artificial Sequence
  Description of Artificial Sequence:  Target Sequence/siNA sense region
uggaagaggcuugugaccc

SEQ ID NO: 1108 - RNA, 19 nt, Artificial Sequence
  Description of Artificial Sequence:  Target Sequence/siNA sense region
caagaaugugucugugucu

SEQ ID NO: 1109 - RNA, 19 nt, Artificial Sequence
  Description of Artificial Sequence:  Target Sequence/siNA sense region
uucucccaguguugaccug

SEQ ID NO: 1110 - RNA, 19 nt, Artificial Sequence
  Description of Artificial Sequence:  Target Sequence/siNA sense region
gauccucuuuuuucauuca

SEQ ID NO: 1111 - RNA, 19 nt, Artificial Sequence
  Description of Artificial Sequence:  Target Sequence/siNA sense region
auuuaaaaagcauuaucau

SEQ ID NO: 1112 - RNA, 19 nt, Artificial Sequence
  Description of Artificial Sequence:  Target Sequence/siNA sense region
ugccccugcugcgggucuc

SEQ ID NO: 1113 - RNA, 19 nt, Artificial Sequence
  Description of Artificial Sequence:  Target Sequence/siNA sense region
caccauggguuuagaacaa

SEQ ID NO: 1114 - RNA, 19 nt, Artificial Sequence
  Description of Artificial Sequence:  Target Sequence/siNA sense region
aagagcuucaagcaauggc

SEQ ID NO: 1115 - RNA, 19 nt, Artificial Sequence
  Description of Artificial Sequence:  Target Sequence/siNA sense region
ccccauccucaaagaagua

SEQ ID NO: 1116 - RNA, 19 nt, Artificial Sequence
  Description of Artificial Sequence:  Target Sequence/siNA sense region
agcaguaccuggggagcug

SEQ ID NO: 1117 - RNA, 19 nt, Artificial Sequence
  Description of Artificial Sequence:  Target Sequence/siNA sense region
gacacuucuguaaaacuag

SEQ ID NO: 1118 - RNA, 19 nt, Artificial Sequence
  Description of Artificial Sequence:  Target Sequence/siNA sense region
gaagauaaaccaggcaacg

SEQ ID NO: 1119 - RNA, 19 nt, Artificial Sequence
  Description of Artificial Sequence:  Target Sequence/siNA sense region
guaaguguucgagguguug

SEQ ID NO: 1120 - RNA, 19 nt, Artificial Sequence
  Description of Artificial Sequence:  Target Sequence/siNA sense region
gaagaugggaaggauuugc

SEQ ID NO: 1121 - RNA, 19 nt, Artificial Sequence
  Description of Artificial Sequence:  Target Sequence/siNA sense region
cagggcugagucuauccaa

SEQ ID NO: 1122 - RNA, 19 nt, Artificial Sequence
  Description of Artificial Sequence:  Target Sequence/siNA sense region
agaggcuuuguuuaggacg

SEQ ID NO: 1123 - RNA, 19 nt, Artificial Sequence
  Description of Artificial Sequence:  Target Sequence/siNA sense region
gugggucccaagccaagcc

SEQ ID NO: 1124 - RNA, 19 nt, Artificial Sequence
  Description of Artificial Sequence:  Target Sequence/siNA sense region
cuuaaguguggaauucgga

SEQ ID NO: 1125 - RNA, 19 nt, Artificial Sequence
  Description of Artificial Sequence:  Target Sequence/siNA sense region
auugauagaaaggaagacu

SEQ ID NO: 1126 - RNA, 19 nt, Artificial Sequence
  Description of Artificial Sequence:  Target Sequence/siNA sense region
uaacguuaccuugcuuugg

SEQ ID NO: 1127 - RNA, 19 nt, Artificial Sequence
  Description of Artificial Sequence:  Target Sequence/siNA sense region
gagaguacuggagccugca

SEQ ID NO: 1128 - RNA, 19 nt, Artificial Sequence
  Description of Artificial Sequence:  Target Sequence/siNA sense region
aaaugcauuguguuugcuc

SEQ ID NO: 1129 - RNA, 19 nt, Artificial Sequence
  Description of Artificial Sequence:  Target Sequence/siNA sense region
cugguggaggugggcaugg

SEQ ID NO: 1130 - RNA, 19 nt, Artificial Sequence
  Description of Artificial Sequence:  Target Sequence/siNA sense region
gggucuguucugaaaugua

SEQ ID NO: 1131 - RNA, 19 nt, Artificial Sequence
  Description of Artificial Sequence:  Target Sequence/siNA sense region
aaaggguucagacgggguu

SEQ ID NO: 1132 - RNA, 19 nt, Artificial Sequence
  Description of Artificial Sequence:  Target Sequence/siNA sense region
uucugguuuuagaagguug

SEQ ID NO: 1133 - RNA, 19 nt, Artificial Sequence
  Description of Artificial Sequence:  Target Sequence/siNA sense region
gcguguucuucgaguuggg

SEQ ID NO: 1134 - RNA, 19 nt, Artificial Sequence
  Description of Artificial Sequence:  Target Sequence/siNA sense region
gcuaaaguagaguucguug

SEQ ID NO: 1135 - RNA, 19 nt, Artificial Sequence
  Description of Artificial Sequence:  Target Sequence/siNA sense region
gugcuguuucugacuccua

SEQ ID NO: 1136 - RNA, 19 nt, Artificial Sequence
  Description of Artificial Sequence:  Target Sequence/siNA sense region
aaugagaguuccuuccaga

SEQ ID NO: 1137 - RNA, 19 nt, Artificial Sequence
  Description of Artificial Sequence:  Target Sequence/siNA sense region
accguuagcugucuccuug

SEQ ID NO: 1138 - RNA, 19 nt, Artificial Sequence
  Description of Artificial Sequence:  Target Sequence/siNA sense region
gccaagccccaggaagaaa

SEQ ID NO: 1139 - RNA, 19 nt, Artificial Sequence
  Description of Artificial Sequence:  Target Sequence/siNA sense region
aaugaugcagcucuggcuc

SEQ ID NO: 1140 - RNA, 19 nt, Artificial Sequence
  Description of Artificial Sequence:  Target Sequence/siNA sense region
ccuugucucccaggcugau

SEQ ID NO: 1141 - RNA, 19 nt, Artificial Sequence
  Description of Artificial Sequence:  Target Sequence/siNA sense region
uccuuuauucagaauacca

SEQ ID NO: 1142 - RNA, 19 nt, Artificial Sequence
  Description of Artificial Sequence:  Target Sequence/siNA sense region
acaaagaaaggacauucag

SEQ ID NO: 1143 - RNA, 19 nt, Artificial Sequence
  Description of Artificial Sequence:  Target Sequence/siNA sense region
gcucaaggcucccugccgu

SEQ ID NO: 1144 - RNA, 19 nt, Artificial Sequence
  Description of Artificial Sequence:  Target Sequence/siNA sense region
uguugaagaguucugacug

SEQ ID NO: 1145 - RNA, 19 nt, Artificial Sequence
  Description of Artificial Sequence:  Target Sequence/siNA sense region
gcacaaaccagcuucuggu

SEQ ID NO: 1146 - RNA, 19 nt, Artificial Sequence
  Description of Artificial Sequence:  Target Sequence/siNA sense region
uuucuucuggaaugaauac

SEQ ID NO: 1147 - RNA, 19 nt, Artificial Sequence
  Description of Artificial Sequence:  Target Sequence/siNA sense region
cccucauaucuguccugau

SEQ ID NO: 1148 - RNA, 19 nt, Artificial Sequence
  Description of Artificial Sequence:  Target Sequence/siNA sense region
ugugauaugucugagacug

SEQ ID NO: 1149 - RNA, 19 nt, Artificial Sequence
  Description of Artificial Sequence:  Target Sequence/siNA sense region
gaaugcgggagguucaaug

SEQ ID NO: 1150 - RNA, 19 nt, Artificial Sequence
  Description of Artificial Sequence:  Target Sequence/siNA sense region
gugaagcuguguguggugu

SEQ ID NO: 1151 - RNA, 19 nt, Artificial Sequence
  Description of Artificial Sequence:  Target Sequence/siNA sense region
ucaaaguuucaggaaggau

SEQ ID NO: 1152 - RNA, 19 nt, Artificial Sequence
  Description of Artificial Sequence:  Target Sequence/siNA sense region
uuuuacccuuuuguucuuc

SEQ ID NO: 1153 - RNA, 19 nt, Artificial Sequence
  Description of Artificial Sequence:  Target Sequence/siNA sense region
cccccuguccccaacccac

SEQ ID NO: 1154 - RNA, 19 nt, Artificial Sequence
  Description of Artificial Sequence:  Target Sequence/siNA sense region
cucucaccccgcaacccau

SEQ ID NO: 1155 - RNA, 19 nt, Artificial Sequence
  Description of Artificial Sequence:  Target Sequence/siNA sense region
ucaguauuuuaguuauuug

SEQ ID NO: 1156 - RNA, 19 nt, Artificial Sequence
  Description of Artificial Sequence:  Target Sequence/siNA sense region
ggccucuacuccaguaaac

SEQ ID NO: 1157 - RNA, 19 nt, Artificial Sequence
  Description of Artificial Sequence:  Target Sequence/siNA sense region
ccugauuggguuuguucac

SEQ ID NO: 1158 - RNA, 19 nt, Artificial Sequence
  Description of Artificial Sequence:  Target Sequence/siNA sense region
cucucugaaugauuauuag

SEQ ID NO: 1159 - RNA, 19 nt, Artificial Sequence
  Description of Artificial Sequence:  Target Sequence/siNA sense region
gccagacuucaaaauuauu

SEQ ID NO: 1160 - RNA, 19 nt, Artificial Sequence
  Description of Artificial Sequence:  Target Sequence/siNA sense region
uuuauagcccaaauuauaa

SEQ ID NO: 1161 - RNA, 19 nt, Artificial Sequence
  Description of Artificial Sequence:  Target Sequence/siNA sense region
acaucuauuguauuauuua

SEQ ID NO: 1162 - RNA, 19 nt, Artificial Sequence
  Description of Artificial Sequence:  Target Sequence/siNA sense region
agacuuuuaacauauagag

SEQ ID NO: 1163 - RNA, 19 nt, Artificial Sequence
  Description of Artificial Sequence:  Target Sequence/siNA sense region
gcuauuucuacugauuuuu

SEQ ID NO: 1164 - RNA, 19 nt, Artificial Sequence
  Description of Artificial Sequence:  Target Sequence/siNA sense region
ugcccuuguucuguccuuu

SEQ ID NO: 1165 - RNA, 19 nt, Artificial Sequence
  Description of Artificial Sequence:  Target Sequence/siNA sense region
uuuuucaaaaaagaaaaug

SEQ ID NO: 1166 - RNA, 19 nt, Artificial Sequence
  Description of Artificial Sequence:  Target Sequence/siNA sense region
guguuuuuuguuugguacc

SEQ ID NO: 1167 - RNA, 19 nt, Artificial Sequence
  Description of Artificial Sequence:  Target Sequence/siNA sense region
cauagugugaaaugcuggg

SEQ ID NO: 1168 - RNA, 19 nt, Artificial Sequence
  Description of Artificial Sequence:  Target Sequence/siNA sense region
gaacaaugacuauaagaca

SEQ ID NO: 1169 - RNA, 19 nt, Artificial Sequence
  Description of Artificial Sequence:  Target Sequence/siNA sense region
augcuauggcacauauauu

SEQ ID NO: 1170 - RNA, 19 nt, Artificial Sequence
  Description of Artificial Sequence:  Target Sequence/siNA sense region
uuauagucuguuuauguag

SEQ ID NO: 1171 - RNA, 19 nt, Artificial Sequence
  Description of Artificial Sequence:  Target Sequence/siNA sense region
gaaacaaauguaauauauu

SEQ ID NO: 1172 - RNA, 19 nt, Artificial Sequence
  Description of Artificial Sequence:  Target Sequence/siNA sense region
uaaagccuuauauauaaug

SEQ ID NO: 1173 - RNA, 19 nt, Artificial Sequence
  Description of Artificial Sequence:  Target Sequence/siNA sense region
gaacuuuguacuauucaca

SEQ ID NO: 1174 - RNA, 19 nt, Artificial Sequence
  Description of Artificial Sequence:  Target Sequence/siNA sense region
auuuuguaucaguauuaug

SEQ ID NO: 1175 - RNA, 19 nt, Artificial Sequence
  Description of Artificial Sequence:  Target Sequence/siNA sense region
guagcauaacaaaggucau

SEQ ID NO: 1176 - RNA, 19 nt, Artificial Sequence
  Description of Artificial Sequence:  Target Sequence/siNA sense region
uaaugcuuucagcaauuga

SEQ ID NO: 1177 - RNA, 19 nt, Artificial Sequence
  Description of Artificial Sequence:  Target Sequence/siNA sense region
augucauuuuauuaaagaa

SEQ ID NO: 1178 - RNA, 19 nt, Artificial Sequence
  Description of Artificial Sequence:  Target Sequence/siNA sense region
agaacauugaaaaacuuga

SEQ ID NO: 1179 - RNA, 19 nt, Artificial Sequence
  Description of Artificial Sequence:  siNA antisense region
cggggucccgggacucagu

SEQ ID NO: 1180 - RNA, 19 nt, Artificial Sequence
  Description of Artificial Sequence:  siNA antisense region
acacacugaccgcucuccc

SEQ ID NO: 1181 - RNA, 19 nt, Artificial Sequence
  Description of Artificial Sequence:  siNA antisense region
agaggaaacgcagcgacca

SEQ ID NO: 1182 - RNA, 19 nt, Artificial Sequence
  Description of Artificial Sequence:  siNA antisense region
gugaugcccggcgcaggca

SEQ ID NO: 1183 - RNA, 19 nt, Artificial Sequence
  Description of Artificial Sequence:  siNA antisense region
acuuucugcggcgcgcaag

SEQ ID NO: 1184 - RNA, 19 nt, Artificial Sequence
  Description of Artificial Sequence:  siNA antisense region
auccaggcugccagacgga

SEQ ID NO: 1185 - RNA, 19 nt, Artificial Sequence
  Description of Artificial Sequence:  siNA antisense region
gugccgguaggagaggaua

SEQ ID NO: 1186 - RNA, 19 nt, Artificial Sequence
  Description of Artificial Sequence:  siNA antisense region
cugcaggggcgucugcggg

SEQ ID NO: 1187 - RNA, 19 nt, Artificial Sequence
  Description of Artificial Sequence:  siNA antisense region
ccgggcgccgaccggcggc

SEQ ID NO: 1188 - RNA, 19 nt, Artificial Sequence
  Description of Artificial Sequence:  siNA antisense region
cgcacagggcuagggagcc

SEQ ID NO: 1189 - RNA, 19 nt, Artificial Sequence
  Description of Artificial Sequence:  siNA antisense region
cagcgcaggacaguugagc

SEQ ID NO: 1190 - RNA, 19 nt, Artificial Sequence
  Description of Artificial Sequence:  siNA antisense region
ggaacucgcggcaccccgc

SEQ ID NO: 1191 - RNA, 19 nt, Artificial Sequence
  Description of Artificial Sequence:  siNA antisense region
agaaggaggcgcggaggug

SEQ ID NO: 1192 - RNA, 19 nt, Artificial Sequence
  Description of Artificial Sequence:  siNA antisense region
cucccagcgccugucuaga

SEQ ID NO: 1193 - RNA, 19 nt, Artificial Sequence
  Description of Artificial Sequence:  siNA antisense region
cucgggagccgguucuuuc

SEQ ID NO: 1194 - RNA, 19 nt, Artificial Sequence
  Description of Artificial Sequence:  siNA antisense region
cgggcgaaaugcccagaac

SEQ ID NO: 1195 - RNA, 19 nt, Artificial Sequence
  Description of Artificial Sequence:  siNA antisense region
gcauccugcaccucgagcc

SEQ ID NO: 1196 - RNA, 19 nt, Artificial Sequence
  Description of Artificial Sequence:  siNA antisense region
ccagcagcaccuugcucug

SEQ ID NO: 1197 - RNA, 19 nt, Artificial Sequence
  Description of Artificial Sequence:  siNA antisense region
agagccacagggcgacggc

SEQ ID NO: 1198 - RNA, 19 nt, Artificial Sequence
  Description of Artificial Sequence:  siNA antisense region
cggcccgggucuccacgca

SEQ ID NO: 1199 - RNA, 19 nt, Artificial Sequence
  Description of Artificial Sequence:  siNA antisense region
uaggcaaacccacagaggc

SEQ ID NO: 1200 - RNA, 19 nt, Artificial Sequence
  Description of Artificial Sequence:  siNA antisense region
gcagaucaagagaaacacu

SEQ ID NO: 1201 - RNA, 19 nt, Artificial Sequence
  Description of Artificial Sequence:  siNA antisense region
uuuguaugcugagccuggg

SEQ ID NO: 1202 - RNA, 19 nt, Artificial Sequence
  Description of Artificial Sequence:  siNA antisense region
uaauuguaaguaugucuuu

SEQ ID NO: 1203 - RNA, 19 nt, Artificial Sequence
  Description of Artificial Sequence:  siNA antisense region
gaagaguuguauuagccuu

SEQ ID NO: 1204 - RNA, 19 nt, Artificial Sequence
  Description of Artificial Sequence:  siNA antisense region
guccccugcaaguaauuug

SEQ ID NO: 1205 - RNA, 19 nt, Artificial Sequence
  Description of Artificial Sequence:  siNA antisense region
gccaguccaagucccucug

SEQ ID NO: 1206 - RNA, 19 nt, Artificial Sequence
  Description of Artificial Sequence:  siNA antisense region
ucugauuauugggccaaag

SEQ ID NO: 1207 - RNA, 19 nt, Artificial Sequence
  Description of Artificial Sequence:  siNA antisense region
cccuuugcucacugccacu

SEQ ID NO: 1208 - RNA, 19 nt, Artificial Sequence
  Description of Artificial Sequence:  siNA antisense region
ugcacucagucaccuccac

SEQ ID NO: 1209 - RNA, 19 nt, Artificial Sequence
  Description of Artificial Sequence:  siNA antisense region
uacagaagaggccaucgcu

SEQ ID NO: 1210 - RNA, 19 nt, Artificial Sequence
  Description of Artificial Sequence:  siNA antisense region
uuggaauugugagugucuu

SEQ ID NO: 1211 - RNA, 19 nt, Artificial Sequence
  Description of Artificial Sequence:  siNA antisense region
ugucauuuccgaucacuuu

SEQ ID NO: 1212 - RNA, 19 nt, Artificial Sequence
  Description of Artificial Sequence:  siNA antisense region
agcacuuguaggcuccagu

SEQ ID NO: 1213 - RNA, 19 nt, Artificial Sequence
  Description of Artificial Sequence:  siNA antisense region
agucaguuucccgguagaa

SEQ ID NO: 1214 - RNA, 19 nt, Artificial Sequence
  Description of Artificial Sequence:  siNA antisense region
cauaaaugaccgaggccaa

SEQ ID NO: 1215 - RNA, 19 nt, Artificial Sequence
  Description of Artificial Sequence:  siNA antisense region
uguaaucuugaacauagac

SEQ ID NO: 1216 - RNA, 19 nt, Artificial Sequence
  Description of Artificial Sequence:  siNA antisense region
aagcaauaaauggagaucu

SEQ ID NO: 1217 - RNA, 19 nt, Artificial Sequence
  Description of Artificial Sequence:  siNA antisense region
cauguuggucacuaacaga

SEQ ID NO: 1218 - RNA, 19 nt, Artificial Sequence
  Description of Artificial Sequence:  siNA antisense region
caguaauguacacgacucc

SEQ ID NO: 1219 - RNA, 19 nt, Artificial Sequence
  Description of Artificial Sequence:  siNA antisense region
caguuuuguuuuuguucuc

SEQ ID NO: 1220 - RNA, 19 nt, Artificial Sequence
  Description of Artificial Sequence:  siNA antisense region
cgagacauggaaucaccac

SEQ ID NO: 1221 - RNA, 19 nt, Artificial Sequence
  Description of Artificial Sequence:  siNA antisense region
ugagauuugaaauggaccc

SEQ ID NO: 1222 - RNA, 19 nt, Artificial Sequence
  Description of Artificial Sequence:  siNA antisense region
uugcacaaagugacacguu

SEQ ID NO: 1223 - RNA, 19 nt, Artificial Sequence
  Description of Artificial Sequence:  siNA antisense region
aucucuuuucuggguaucu

SEQ ID NO: 1224 - RNA, 19 nt, Artificial Sequence
  Description of Artificial Sequence:  siNA antisense region
uguuaccaucaggaacaaa

SEQ ID NO: 1225 - RNA, 19 nt, Artificial Sequence
  Description of Artificial Sequence:  siNA antisense region
ugcugucccaggaaauucu

SEQ ID NO: 1226 - RNA, 19 nt, Artificial Sequence
  Description of Artificial Sequence:  siNA antisense region
gaauaguaaagcccuucuu

SEQ ID NO: 1227 - RNA, 19 nt, Artificial Sequence
  Description of Artificial Sequence:  siNA antisense region
agcugaucauguagcuggg

SEQ ID NO: 1228 - RNA, 19 nt, Artificial Sequence
  Description of Artificial Sequence:  siNA antisense region
agaagaccaugccagcaua

SEQ ID NO: 1229 - RNA, 19 nt, Artificial Sequence
  Description of Artificial Sequence:  siNA antisense region
cauuaauuuuugcuucaca

SEQ ID NO: 1230 - RNA, 19 nt, Artificial Sequence
  Description of Artificial Sequence:  siNA antisense region
uagacugguaacuuucauc

SEQ ID NO: 1231 - RNA, 19 nt, Artificial Sequence
  Description of Artificial Sequence:  siNA antisense region
cgacaacuauguacauaau

SEQ ID NO: 1232 - RNA, 19 nt, Artificial Sequence
  Description of Artificial Sequence:  siNA antisense region
aaauccuauacccuacaac

SEQ ID NO: 1233 - RNA, 19 nt, Artificial Sequence
  Description of Artificial Sequence:  siNA antisense region
gacucagaaccacaucaua

SEQ ID NO: 1234 - RNA, 19 nt, Artificial Sequence
  Description of Artificial Sequence:  siNA antisense region
guucaauuccaugagacgg

SEQ ID NO: 1235 - RNA, 19 nt, Artificial Sequence
  Description of Artificial Sequence:  siNA antisense region
gcuuuucuccaacagauag

SEQ ID NO: 1236 - RNA, 19 nt, Artificial Sequence
  Description of Artificial Sequence:  siNA antisense region
cuguacaauuuaagacaag

SEQ ID NO: 1237 - RNA, 19 nt, Artificial Sequence
  Description of Artificial Sequence:  siNA antisense region
cauuuaguucaguucuugc

SEQ ID NO: 1238 - RNA, 19 nt, Artificial Sequence
  Description of Artificial Sequence:  siNA antisense region
aguugaagucaauccccac

SEQ ID NO: 1239 - RNA, 19 nt, Artificial Sequence
  Description of Artificial Sequence:  siNA antisense region
ucgaagaaggguauuccca

SEQ ID NO: 1240 - RNA, 19 nt, Artificial Sequence
  Description of Artificial Sequence:  siNA antisense region
guuucuuaugcugaugcuu

SEQ ID NO: 1241 - RNA, 19 nt, Artificial Sequence
  Description of Artificial Sequence:  siNA antisense region
uuaggucucgguuuacaag

SEQ ID NO: 1242 - RNA, 19 nt, Artificial Sequence
  Description of Artificial Sequence:  siNA antisense region
cacucccagacuggguuuu

SEQ ID NO: 1243 - RNA, 19 nt, Artificial Sequence
  Description of Artificial Sequence:  siNA antisense region
ucaaaaauuucuucaucuc

SEQ ID NO: 1244 - RNA, 19 nt, Artificial Sequence
  Description of Artificial Sequence:  siNA antisense region
caucuauaguuaaggugcu

SEQ ID NO: 1245 - RNA, 19 nt, Artificial Sequence
  Description of Artificial Sequence:  siNA antisense region
ggucacuccggguuacacc

SEQ ID NO: 1246 - RNA, 19 nt, Artificial Sequence
  Description of Artificial Sequence:  siNA antisense region
cacagguguacaauccuug

SEQ ID NO: 1247 - RNA, 19 nt, Artificial Sequence
  Description of Artificial Sequence:  siNA antisense region
ucagcccacuggaugcugc

SEQ ID NO: 1248 - RNA, 19 nt, Artificial Sequence
  Description of Artificial Sequence:  siNA antisense region
ugcuguucuucuuggucau

SEQ ID NO: 1249 - RNA, 19 nt, Artificial Sequence
  Description of Artificial Sequence:  siNA antisense region
cauggacccugacaaaugu

SEQ ID NO: 1250 - RNA, 19 nt, Artificial Sequence
  Description of Artificial Sequence:  siNA antisense region
aagcaacaaaagguuuuuc

SEQ ID NO: 1251 - RNA, 19 nt, Artificial Sequence
  Description of Artificial Sequence:  siNA antisense region
auuccaugccacuuccaaa

SEQ ID NO: 1252 - RNA, 19 nt, Artificial Sequence
  Description of Artificial Sequence:  siNA antisense region
ccguggcuuccaccagaga

SEQ ID NO: 1253 - RNA, 19 nt, Artificial Sequence
  Description of Artificial Sequence:  siNA antisense region
uucugacacgcucccccac

SEQ ID NO: 1254 - RNA, 19 nt, Artificial Sequence
  Description of Artificial Sequence:  siNA antisense region
caagguacuucgcagggau

SEQ ID NO: 1255 - RNA, 19 nt, Artificial Sequence
  Description of Artificial Sequence:  siNA antisense region
uuucuggggguggguaacc

SEQ ID NO: 1256 - RNA, 19 nt, Artificial Sequence
  Description of Artificial Sequence:  siNA antisense region
cauuuuuauaccauuuuau

SEQ ID NO: 1257 - RNA, 19 nt, Artificial Sequence
  Description of Artificial Sequence:  siNA antisense region
uggacucaagggguauucc

SEQ ID NO: 1258 - RNA, 19 nt, Artificial Sequence
  Description of Artificial Sequence:  siNA antisense region
ccgcuuuaauugugugauu

SEQ ID NO: 1259 - RNA, 19 nt, Artificial Sequence
  Description of Artificial Sequence:  siNA antisense region
uaaucgucaguacaugccc

SEQ ID NO: 1260 - RNA, 19 nt, Artificial Sequence
  Description of Artificial Sequence:  siNA antisense region
cucuuucacucacuuccau

SEQ ID NO: 1261 - RNA, 19 nt, Artificial Sequence
  Description of Artificial Sequence:  siNA antisense region
caguguaauuuccuguguc

SEQ ID NO: 1262 - RNA, 19 nt, Artificial Sequence
  Description of Artificial Sequence:  siNA antisense region
ugggauugguaaggaugac

SEQ ID NO: 1263 - RNA, 19 nt, Artificial Sequence
  Description of Artificial Sequence:  siNA antisense region
ucugcuucuccuuugaaau

SEQ ID NO: 1264 - RNA, 19 nt, Artificial Sequence
  Description of Artificial Sequence:  siNA antisense region
ccagagagaccacauggcu

SEQ ID NO: 1265 - RNA, 19 nt, Artificial Sequence
  Description of Artificial Sequence:  siNA antisense region
ggggugggacauacacaac

SEQ ID NO: 1266 - RNA, 19 nt, Artificial Sequence
  Description of Artificial Sequence:  siNA antisense region
gagauuucucaccaaucug

SEQ ID NO: 1267 - RNA, 19 nt, Artificial Sequence
  Description of Artificial Sequence:  siNA antisense region
aauccacaggagagauuag

SEQ ID NO: 1268 - RNA, 19 nt, Artificial Sequence
  Description of Artificial Sequence:  siNA antisense region
uggugccguacugguagga

SEQ ID NO: 1269 - RNA, 19 nt, Artificial Sequence
  Description of Artificial Sequence:  siNA antisense region
uacaugucagcguuugagu

SEQ ID NO: 1270 - RNA, 19 nt, Artificial Sequence
  Description of Artificial Sequence:  siNA antisense region
gaggaauggcauagaccgu

SEQ ID NO: 1271 - RNA, 19 nt, Artificial Sequence
  Description of Artificial Sequence:  siNA antisense region
aguggaugugaugcggggg

SEQ ID NO: 1272 - RNA, 19 nt, Artificial Sequence
  Description of Artificial Sequence:  siNA antisense region
ccuccaacugccaauacca

SEQ ID NO: 1273 - RNA, 19 nt, Artificial Sequence
  Description of Artificial Sequence:  siNA antisense region
gcucguuggcgcacucuuc

SEQ ID NO: 1274 - RNA, 19 nt, Artificial Sequence
  Description of Artificial Sequence:  siNA antisense region
cugagacagcuuggcuggg

SEQ ID NO: 1275 - RNA, 19 nt, Artificial Sequence
  Description of Artificial Sequence:  siNA antisense region
aaggguauggguuugucac

SEQ ID NO: 1276 - RNA, 19 nt, Artificial Sequence
  Description of Artificial Sequence:  siNA antisense region
cacuucuccauucuucaca

SEQ ID NO: 1277 - RNA, 19 nt, Artificial Sequence
  Description of Artificial Sequence:  siNA antisense region
cucccuggaaguccuccac

SEQ ID NO: 1278 - RNA, 19 nt, Artificial Sequence
  Description of Artificial Sequence:  siNA antisense region
uaacuucaauuuuauuucc

SEQ ID NO: 1279 - RNA, 19 nt, Artificial Sequence
  Description of Artificial Sequence:  siNA antisense region
gagcaaauugauuuuuauu

SEQ ID NO: 1280 - RNA, 19 nt, Artificial Sequence
  Description of Artificial Sequence:  siNA antisense region
uguuuuuuccuucaauuag

SEQ ID NO: 1281 - RNA, 19 nt, Artificial Sequence
  Description of Artificial Sequence:  siNA antisense region
caaggguacuuacaguuuu

SEQ ID NO: 1282 - RNA, 19 nt, Artificial Sequence
  Description of Artificial Sequence:  siNA antisense region
cauuugccgcuuggauaac

SEQ ID NO: 1283 - RNA, 19 nt, Artificial Sequence
  Description of Artificial Sequence:  siNA antisense region
auuuguacaaagcugacac

SEQ ID NO: 1284 - RNA, 19 nt, Artificial Sequence
  Description of Artificial Sequence:  siNA antisense region
cuuuguugaccgcuucaca

SEQ ID NO: 1285 - RNA, 19 nt, Artificial Sequence
  Description of Artificial Sequence:  siNA antisense region
cccucucuccucucccgac

SEQ ID NO: 1286 - RNA, 19 nt, Artificial Sequence
  Description of Artificial Sequence:  siNA antisense region
ucacguggaaggagaucac

SEQ ID NO: 1287 - RNA, 19 nt, Artificial Sequence
  Description of Artificial Sequence:  siNA antisense region
uaauuucaggaccccuggu

SEQ ID NO: 1288 - RNA, 19 nt, Artificial Sequence
  Description of Artificial Sequence:  siNA antisense region
gcaugucagguugcaaagu

SEQ ID NO: 1289 - RNA, 19 nt, Artificial Sequence
  Description of Artificial Sequence:  siNA antisense region
ucuccugcucagugggcug

SEQ ID NO: 1290 - RNA, 19 nt, Artificial Sequence
  Description of Artificial Sequence:  siNA antisense region
ugcaccacaaagacacgcu

SEQ ID NO: 1291 - RNA, 19 nt, Artificial Sequence
  Description of Artificial Sequence:  siNA antisense region
acguagaucugucugcagu

SEQ ID NO: 1292 - RNA, 19 nt, Artificial Sequence
  Description of Artificial Sequence:  siNA antisense region
accaugugagguucucaaa

SEQ ID NO: 1293 - RNA, 19 nt, Artificial Sequence
  Description of Artificial Sequence:  siNA antisense region
gcugugggccaagcuugua

SEQ ID NO: 1294 - RNA, 19 nt, Artificial Sequence
  Description of Artificial Sequence:  siNA antisense region
ccacauggauuggcagagg

SEQ ID NO: 1295 - RNA, 19 nt, Artificial Sequence
  Description of Artificial Sequence:  siNA antisense region
caggugugggcaacucucc

SEQ ID NO: 1296 - RNA, 19 nt, Artificial Sequence
  Description of Artificial Sequence:  siNA antisense region
uauccaaguucuugcaaac

SEQ ID NO: 1297 - RNA, 19 nt, Artificial Sequence
  Description of Artificial Sequence:  siNA antisense region
cauucaauuuccaaagagu

SEQ ID NO: 1298 - RNA, 19 nt, Artificial Sequence
  Description of Artificial Sequence:  siNA antisense region
uauuagagaacaugguggc

SEQ ID NO: 1299 - RNA, 19 nt, Artificial Sequence
  Description of Artificial Sequence:  siNA antisense region
ucaaaaugucauuugugcu

SEQ ID NO: 1300 - RNA, 19 nt, Artificial Sequence
  Description of Artificial Sequence:  siNA antisense region
cauucuuaagcuccaugau

SEQ ID NO: 1301 - RNA, 19 nt, Artificial Sequence
  Description of Artificial Sequence:  siNA antisense region
cuugguccugcaaggaugc

SEQ ID NO: 1302 - RNA, 19 nt, Artificial Sequence
  Description of Artificial Sequence:  siNA antisense region
caaggcagacauagucucc

SEQ ID NO: 1303 - RNA, 19 nt, Artificial Sequence
  Description of Artificial Sequence:  siNA antisense region
uggucuuccugucuugagc

SEQ ID NO: 1304 - RNA, 19 nt, Artificial Sequence
  Description of Artificial Sequence:  siNA antisense region
ccacgcaaugucuuuucuu

SEQ ID NO: 1305 - RNA, 19 nt, Artificial Sequence
  Description of Artificial Sequence:  siNA antisense region
ggacugugagcugccugac

SEQ ID NO: 1306 - RNA, 19 nt, Artificial Sequence
  Description of Artificial Sequence:  siNA antisense region
ugggugccacacgcucuag

SEQ ID NO: 1307 - RNA, 19 nt, Artificial Sequence
  Description of Artificial Sequence:  siNA antisense region
ccagguuuccugugaucgu

SEQ ID NO: 1308 - RNA, 19 nt, Artificial Sequence
  Description of Artificial Sequence:  siNA antisense region
uacuugucgucugauucuc

SEQ ID NO: 1309 - RNA, 19 nt, Artificial Sequence
  Description of Artificial Sequence:  siNA antisense region
cuucgaugcuuuccccaau

SEQ ID NO: 1310 - RNA, 19 nt, Artificial Sequence
  Description of Artificial Sequence:  siNA antisense region
cagaugccgugcaugagac

SEQ ID NO: 1311 - RNA, 19 nt, Artificial Sequence
  Description of Artificial Sequence:  siNA antisense region
ucuguggagggggauuccc

SEQ ID NO: 1312 - RNA, 19 nt, Artificial Sequence
  Description of Artificial Sequence:  siNA antisense region
uaucuuuaaaccacaugau

SEQ ID NO: 1313 - RNA, 19 nt, Artificial Sequence
  Description of Artificial Sequence:  siNA antisense region
cuucuacaagggucucauu

SEQ ID NO: 1314 - RNA, 19 nt, Artificial Sequence
  Description of Artificial Sequence:  siNA antisense region
ucaauacaaugccugaguc

SEQ ID NO: 1315 - RNA, 19 nt, Artificial Sequence
  Description of Artificial Sequence:  siNA antisense region
gguuccgguucccauccuu

SEQ ID NO: 1316 - RNA, 19 nt, Artificial Sequence
  Description of Artificial Sequence:  siNA antisense region
ucacucugcggauagugag

SEQ ID NO: 1317 - RNA, 19 nt, Artificial Sequence
  Description of Artificial Sequence:  siNA antisense region
ggccuucguccuccuuccu

SEQ ID NO: 1318 - RNA, 19 nt, Artificial Sequence
  Description of Artificial Sequence:  siNA antisense region
augccuggcagguguagag

SEQ ID NO: 1319 - RNA, 19 nt, Artificial Sequence
  Description of Artificial Sequence:  siNA antisense region
cacagccaagaacacugca

SEQ ID NO: 1320 - RNA, 19 nt, Artificial Sequence
  Description of Artificial Sequence:  siNA antisense region
aaaaugccuccacuuuugc

SEQ ID NO: 1321 - RNA, 19 nt, Artificial Sequence
  Description of Artificial Sequence:  siNA antisense region
gggcaccuucuauuaugaa

SEQ ID NO: 1322 - RNA, 19 nt, Artificial Sequence
  Description of Artificial Sequence:  siNA antisense region
ccaaguucgucuuuuccug

SEQ ID NO: 1323 - RNA, 19 nt, Artificial Sequence
  Description of Artificial Sequence:  siNA antisense region
cuacuagaauaaugauuuc

SEQ ID NO: 1324 - RNA, 19 nt, Artificial Sequence
  Description of Artificial Sequence:  siNA antisense region
uggcaaucaccgccgugcc

SEQ ID NO: 1325 - RNA, 19 nt, Artificial Sequence
  Description of Artificial Sequence:  siNA antisense region
gaaguagccagaagaacau

SEQ ID NO: 1326 - RNA, 19 nt, Artificial Sequence
  Description of Artificial Sequence:  siNA antisense region
uccguaggaugaugacaag

SEQ ID NO: 1327 - RNA, 19 nt, Artificial Sequence
  Description of Artificial Sequence:  siNA antisense region
cauuggcccgcuuaacggu

SEQ ID NO: 1328 - RNA, 19 nt, Artificial Sequence
  Description of Artificial Sequence:  siNA antisense region
cugucuucaguuccccucc

SEQ ID NO: 1329 - RNA, 19 nt, Artificial Sequence
  Description of Artificial Sequence:  siNA antisense region
ugacgauggacaaguagcc

SEQ ID NO: 1330 - RNA, 19 nt, Artificial Sequence
  Description of Artificial Sequence:  siNA antisense region
ggaguucaucuggauccau

SEQ ID NO: 1331 - RNA, 19 nt, Artificial Sequence
  Description of Artificial Sequence:  siNA antisense region
cacaauguucauccaaugg

SEQ ID NO: 1332 - RNA, 19 nt, Artificial Sequence
  Description of Artificial Sequence:  siNA antisense region
caucauaaggcagucguuc

SEQ ID NO: 1333 - RNA, 19 nt, Artificial Sequence
  Description of Artificial Sequence:  siNA antisense region
ggaauucccauuugcuggc

SEQ ID NO: 1334 - RNA, 19 nt, Artificial Sequence
  Description of Artificial Sequence:  siNA antisense region
gcuucagccggucucuggg

SEQ ID NO: 1335 - RNA, 19 nt, Artificial Sequence
  Description of Artificial Sequence:  siNA antisense region
ggccaagaggcuuaccuag

SEQ ID NO: 1336 - RNA, 19 nt, Artificial Sequence
  Description of Artificial Sequence:  siNA antisense region
cuuggccaaaggcaccacg

SEQ ID NO: 1337 - RNA, 19 nt, Artificial Sequence
  Description of Artificial Sequence:  siNA antisense region
aggcaucugcuucaaucac

SEQ ID NO: 1338 - RNA, 19 nt, Artificial Sequence
  Description of Artificial Sequence:  siNA antisense region
cugucuugucaauuccaaa

SEQ ID NO: 1339 - RNA, 19 nt, Artificial Sequence
  Description of Artificial Sequence:  siNA antisense region
cuacuguccugcaaguugc

SEQ ID NO: 1340 - RNA, 19 nt, Artificial Sequence
  Description of Artificial Sequence:  siNA antisense region
cuuucaacauuuugacugc

SEQ ID NO: 1341 - RNA, 19 nt, Artificial Sequence
  Description of Artificial Sequence:  siNA antisense region
cacuguguguugcuccuuc

SEQ ID NO: 1342 - RNA, 19 nt, Artificial Sequence
  Description of Artificial Sequence:  siNA antisense region
acaugagagcucgaugcuc

SEQ ID NO: 1343 - RNA, 19 nt, Artificial Sequence
  Description of Artificial Sequence:  siNA antisense region
ugaggaucuugaguucaga

SEQ ID NO: 1344 - RNA, 19 nt, Artificial Sequence
  Description of Artificial Sequence:  siNA antisense region
gauggugaccaauaugaau

SEQ ID NO: 1345 - RNA, 19 nt, Artificial Sequence
  Description of Artificial Sequence:  siNA antisense region
gaagguugaccacauugag

SEQ ID NO: 1346 - RNA, 19 nt, Artificial Sequence
  Description of Artificial Sequence:  siNA antisense region
gcuugguacaggcaccuag

SEQ ID NO: 1347 - RNA, 19 nt, Artificial Sequence
  Description of Artificial Sequence:  siNA antisense region
ccaugaguggcccuccugg

SEQ ID NO: 1348 - RNA, 19 nt, Artificial Sequence
  Description of Artificial Sequence:  siNA antisense region
ugcagaauuccacaaucac

SEQ ID NO: 1349 - RNA, 19 nt, Artificial Sequence
  Description of Artificial Sequence:  siNA antisense region
uggacagguuuccaaauuu

SEQ ID NO: 1350 - RNA, 19 nt, Artificial Sequence
  Description of Artificial Sequence:  siNA antisense region
ucuugcuccucagguaagu

SEQ ID NO: 1351 - RNA, 19 nt, Artificial Sequence
  Description of Artificial Sequence:  siNA antisense region
aggggacaaauucauuucu

SEQ ID NO: 1352 - RNA, 19 nt, Artificial Sequence
  Description of Artificial Sequence:  siNA antisense region
gugccccuuuggucuugua

SEQ ID NO: 1353 - RNA, 19 nt, Artificial Sequence
  Description of Artificial Sequence:  siNA antisense region
cuuucccuugacggaaucg

SEQ ID NO: 1354 - RNA, 19 nt, Artificial Sequence
  Description of Artificial Sequence:  siNA antisense region
ggauugcuccaacguaguc

SEQ ID NO: 1355 - RNA, 19 nt, Artificial Sequence
  Description of Artificial Sequence:  siNA antisense region
gccguuucagauccacagg

SEQ ID NO: 1356 - RNA, 19 nt, Artificial Sequence
  Description of Artificial Sequence:  siNA antisense region
uggugaugcuguccaagcg

SEQ ID NO: 1357 - RNA, 19 nt, Artificial Sequence
  Description of Artificial Sequence:  siNA antisense region
uggcugagcucuggcuacu

SEQ ID NO: 1358 - RNA, 19 nt, Artificial Sequence
  Description of Artificial Sequence:  siNA antisense region
ccuccacaaauccagagcu

SEQ ID NO: 1359 - RNA, 19 nt, Artificial Sequence
  Description of Artificial Sequence:  siNA antisense region
caucacugagggacuucuc

SEQ ID NO: 1360 - RNA, 19 nt, Artificial Sequence
  Description of Artificial Sequence:  siNA antisense region
gagcuuccucuucuucuac

SEQ ID NO: 1361 - RNA, 19 nt, Artificial Sequence
  Description of Artificial Sequence:  siNA antisense region
ccuuauacagaucuucagg

SEQ ID NO: 1362 - RNA, 19 nt, Artificial Sequence
  Description of Artificial Sequence:  siNA antisense region
gcuccaaggucaggaaguc

SEQ ID NO: 1363 - RNA, 19 nt, Artificial Sequence
  Description of Artificial Sequence:  siNA antisense region
agcuguaacagaugagaug

SEQ ID NO: 1364 - RNA, 19 nt, Artificial Sequence
  Description of Artificial Sequence:  siNA antisense region
ugcccuuagccacuuggaa

SEQ ID NO: 1365 - RNA, 19 nt, Artificial Sequence
  Description of Artificial Sequence:  siNA antisense region
gcgaugccaagaacuccau

SEQ ID NO: 1366 - RNA, 19 nt, Artificial Sequence
  Description of Artificial Sequence:  siNA antisense region
cccuguggauacacuuucg

SEQ ID NO: 1367 - RNA, 19 nt, Artificial Sequence
  Description of Artificial Sequence:  siNA antisense region
uauuucgugccgccagguc

SEQ ID NO: 1368 - RNA, 19 nt, Artificial Sequence
  Description of Artificial Sequence:  siNA antisense region
ucuucuccgauaagaggau

SEQ ID NO: 1369 - RNA, 19 nt, Artificial Sequence
  Description of Artificial Sequence:  siNA antisense region
cacagauuuuaaccacguu

SEQ ID NO: 1370 - RNA, 19 nt, Artificial Sequence
  Description of Artificial Sequence:  siNA antisense region
cccgggccaagccaaaguc

SEQ ID NO: 1371 - RNA, 19 nt, Artificial Sequence
  Description of Artificial Sequence:  siNA antisense region
cuggaucuuuauaaauauc

SEQ ID NO: 1372 - RNA, 19 nt, Artificial Sequence
  Description of Artificial Sequence:  siNA antisense region
cuccuuuucugacauaauc

SEQ ID NO: 1373 - RNA, 19 nt, Artificial Sequence
  Description of Artificial Sequence:  siNA antisense region
ucaaagggaggcgagcauc

SEQ ID NO: 1374 - RNA, 19 nt, Artificial Sequence
  Description of Artificial Sequence:  siNA antisense region
uuucuggggccauccauuu

SEQ ID NO: 1375 - RNA, 19 nt, Artificial Sequence
  Description of Artificial Sequence:  siNA antisense region
acacucugucaaaaauugu

SEQ ID NO: 1376 - RNA, 19 nt, Artificial Sequence
  Description of Artificial Sequence:  siNA antisense region
cgucacucuggauugugua

SEQ ID NO: 1377 - RNA, 19 nt, Artificial Sequence
  Description of Artificial Sequence:  siNA antisense region
aaacaccaaaagaccagac

SEQ ID NO: 1378 - RNA, 19 nt, Artificial Sequence
  Description of Artificial Sequence:  siNA antisense region
aaaauauuucccacagcaa

SEQ ID NO: 1379 - RNA, 19 nt, Artificial Sequence
  Description of Artificial Sequence:  siNA antisense region
auggagaagcaccuaagga

SEQ ID NO: 1380 - RNA, 19 nt, Artificial Sequence
  Description of Artificial Sequence:  siNA antisense region
caaucuuuaccccaggaua

SEQ ID NO: 1381 - RNA, 19 nt, Artificial Sequence
  Description of Artificial Sequence:  siNA antisense region
gccuacaaaauucuucauc

SEQ ID NO: 1382 - RNA, 19 nt, Artificial Sequence
  Description of Artificial Sequence:  siNA antisense region
uaguuccuucuuucaaucg

SEQ ID NO: 1383 - RNA, 19 nt, Artificial Sequence
  Description of Artificial Sequence:  siNA antisense region
aaucaggggcccucauucu

SEQ ID NO: 1384 - RNA, 19 nt, Artificial Sequence
  Description of Artificial Sequence:  siNA antisense region
acauuucugguguaguaua

SEQ ID NO: 1385 - RNA, 19 nt, Artificial Sequence
  Description of Artificial Sequence:  siNA antisense region
aguccagcauggucuggua

SEQ ID NO: 1386 - RNA, 19 nt, Artificial Sequence
  Description of Artificial Sequence:  siNA antisense region
ugggcuccccgugccagca

SEQ ID NO: 1387 - RNA, 19 nt, Artificial Sequence
  Description of Artificial Sequence:  siNA antisense region
aaaacgugggucucugacu

SEQ ID NO: 1388 - RNA, 19 nt, Artificial Sequence
  Description of Artificial Sequence:  siNA antisense region
aauguuccaccaacucuga

SEQ ID NO: 1389 - RNA, 19 nt, Artificial Sequence
  Description of Artificial Sequence:  siNA antisense region
cuugcaagagauuucccaa

SEQ ID NO: 1390 - RNA, 19 nt, Artificial Sequence
  Description of Artificial Sequence:  siNA antisense region
cauccugcugagcauuagc

SEQ ID NO: 1391 - RNA, 19 nt, Artificial Sequence
  Description of Artificial Sequence:  siNA antisense region
gaacaauguagucuuugcc

SEQ ID NO: 1392 - RNA, 19 nt, Artificial Sequence
  Description of Artificial Sequence:  siNA antisense region
aagucucugauaucggaag

SEQ ID NO: 1393 - RNA, 19 nt, Artificial Sequence
  Description of Artificial Sequence:  siNA antisense region
aauccucuuccaugcucaa

SEQ ID NO: 1394 - RNA, 19 nt, Artificial Sequence
  Description of Artificial Sequence:  siNA antisense region
uaggcagagagaguccaga

SEQ ID NO: 1395 - RNA, 19 nt, Artificial Sequence
  Description of Artificial Sequence:  siNA antisense region
uacaggaaacaggugaggu

SEQ ID NO: 1396 - RNA, 19 nt, Artificial Sequence
  Description of Artificial Sequence:  siNA antisense region
auacuuccuccuccuccau

SEQ ID NO: 1397 - RNA, 19 nt, Artificial Sequence
  Description of Artificial Sequence:  siNA antisense region
aauggaauuuggggucaca

SEQ ID NO: 1398 - RNA, 19 nt, Artificial Sequence
  Description of Artificial Sequence:  siNA antisense region
uuccugcuguguugucaua

SEQ ID NO: 1399 - RNA, 19 nt, Artificial Sequence
  Description of Artificial Sequence:  siNA antisense region
ucugcagauacugacugau

SEQ ID NO: 1400 - RNA, 19 nt, Artificial Sequence
  Description of Artificial Sequence:  siNA antisense region
ggcucuuucgcuuacuguu

SEQ ID NO: 1401 - RNA, 19 nt, Artificial Sequence
  Description of Artificial Sequence:  siNA antisense region
uuuuuacacucacaggccg

SEQ ID NO: 1402 - RNA, 19 nt, Artificial Sequence
  Description of Artificial Sequence:  siNA antisense region
acgggauaucuucaaaugu

SEQ ID NO: 1403 - RNA, 19 nt, Artificial Sequence
  Description of Artificial Sequence:  siNA antisense region
uuacuucugguucuucuaa

SEQ ID NO: 1404 - RNA, 19 nt, Artificial Sequence
  Description of Artificial Sequence:  siNA antisense region
ugucaucugggauuacuuu

SEQ ID NO: 1405 - RNA, 19 nt, Artificial Sequence
  Description of Artificial Sequence:  siNA antisense region
uaccacuguccgucugguu

SEQ ID NO: 1406 - RNA, 19 nt, Artificial Sequence
  Description of Artificial Sequence:  siNA antisense region
cuucugaggcaagaaccau

SEQ ID NO: 1407 - RNA, 19 nt, Artificial Sequence
  Description of Artificial Sequence:  siNA antisense region
cuuccaaaguuuucagcuc

SEQ ID NO: 1408 - RNA, 19 nt, Artificial Sequence
  Description of Artificial Sequence:  siNA antisense region
gagauaauuugguucuguc

SEQ ID NO: 1409 - RNA, 19 nt, Artificial Sequence
  Description of Artificial Sequence:  siNA antisense region
ccauuccaccaaaagaugg

SEQ ID NO: 1410 - RNA, 19 nt, Artificial Sequence
  Description of Artificial Sequence:  siNA antisense region
cccugcuuuugcugggcac

SEQ ID NO: 1411 - RNA, 19 nt, Artificial Sequence
  Description of Artificial Sequence:  siNA antisense region
cuucagaugccacagacuc

SEQ ID NO: 1412 - RNA, 19 nt, Artificial Sequence
  Description of Artificial Sequence:  siNA antisense region
cgcuugucugguuugagcc

SEQ ID NO: 1413 - RNA, 19 nt, Artificial Sequence
  Description of Artificial Sequence:  siNA antisense region
gauauccggacugguagcc

SEQ ID NO: 1414 - RNA, 19 nt, Artificial Sequence
  Description of Artificial Sequence:  siNA antisense region
ugucugugucaucggagug

SEQ ID NO: 1415 - RNA, 19 nt, Artificial Sequence
  Description of Artificial Sequence:  siNA antisense region
cacuggaguacacgguggu

SEQ ID NO: 1416 - RNA, 19 nt, Artificial Sequence
  Description of Artificial Sequence:  siNA antisense region
uuaaaaguucugcuuccuc

SEQ ID NO: 1417 - RNA, 19 nt, Artificial Sequence
  Description of Artificial Sequence:  siNA antisense region
cuccaaucucuaucagcuu

SEQ ID NO: 1418 - RNA, 19 nt, Artificial Sequence
  Description of Artificial Sequence:  siNA antisense region
cugugcuaccgguuugcac

SEQ ID NO: 1419 - RNA, 19 nt, Artificial Sequence
  Description of Artificial Sequence:  siNA antisense region
caggcuggagaaucugggc

SEQ ID NO: 1420 - RNA, 19 nt, Artificial Sequence
  Description of Artificial Sequence:  siNA antisense region
ucagugugguccccgaguc

SEQ ID NO: 1421 - RNA, 19 nt, Artificial Sequence
  Description of Artificial Sequence:  siNA antisense region
uuuaaacaggaggagagcu

SEQ ID NO: 1422 - RNA, 19 nt, Artificial Sequence
  Description of Artificial Sequence:  siNA antisense region
gggguguggaugcuuccuu

SEQ ID NO: 1423 - RNA, 19 nt, Artificial Sequence
  Description of Artificial Sequence:  siNA antisense region
augugauguccgggaguug

SEQ ID NO: 1424 - RNA, 19 nt, Artificial Sequence
  Description of Artificial Sequence:  siNA antisense region
aaucugagcagaccucuca

SEQ ID NO: 1425 - RNA, 19 nt, Artificial Sequence
  Description of Artificial Sequence:  siNA antisense region
gaaagaacaacacuucaaa

SEQ ID NO: 1426 - RNA, 19 nt, Artificial Sequence
  Description of Artificial Sequence:  siNA antisense region
ggcuacuuccugcuggugg

SEQ ID NO: 1427 - RNA, 19 nt, Artificial Sequence
  Description of Artificial Sequence:  siNA antisense region
gaaaugaaaaucaaaugcg

SEQ ID NO: 1428 - RNA, 19 nt, Artificial Sequence
  Description of Artificial Sequence:  siNA antisense region
gguccuuuuucuguugucg

SEQ ID NO: 1429 - RNA, 19 nt, Artificial Sequence
  Description of Artificial Sequence:  siNA antisense region
uggcucccugcaguccgag

SEQ ID NO: 1430 - RNA, 19 nt, Artificial Sequence
  Description of Artificial Sequence:  siNA antisense region
aggauaugccuagaagacu

SEQ ID NO: 1431 - RNA, 19 nt, Artificial Sequence
  Description of Artificial Sequence:  siNA antisense region
gggucacaagccucuucca

SEQ ID NO: 1432 - RNA, 19 nt, Artificial Sequence
  Description of Artificial Sequence:  siNA antisense region
agacacagacacauucuug

SEQ ID NO: 1433 - RNA, 19 nt, Artificial Sequence
  Description of Artificial Sequence:  siNA antisense region
caggucaacacugggagaa

SEQ ID NO: 1434 - RNA, 19 nt, Artificial Sequence
  Description of Artificial Sequence:  siNA antisense region
ugaaugaaaaaagaggauc

SEQ ID NO: 1435 - RNA, 19 nt, Artificial Sequence
  Description of Artificial Sequence:  siNA antisense region
augauaaugcuuuuuaaau

SEQ ID NO: 1436 - RNA, 19 nt, Artificial Sequence
  Description of Artificial Sequence:  siNA antisense region
gagacccgcagcaggggca

SEQ ID NO: 1437 - RNA, 19 nt, Artificial Sequence
  Description of Artificial Sequence:  siNA antisense region
uuguucuaaacccauggug

SEQ ID NO: 1438 - RNA, 19 nt, Artificial Sequence
  Description of Artificial Sequence:  siNA antisense region
gccauugcuugaagcucuu

SEQ ID NO: 1439 - RNA, 19 nt, Artificial Sequence
  Description of Artificial Sequence:  siNA antisense region
uacuucuuugaggaugggg

SEQ ID NO: 1440 - RNA, 19 nt, Artificial Sequence
  Description of Artificial Sequence:  siNA antisense region
cagcuccccagguacugcu

SEQ ID NO: 1441 - RNA, 19 nt, Artificial Sequence
  Description of Artificial Sequence:  siNA antisense region
cuaguuuuacagaaguguc

SEQ ID NO: 1442 - RNA, 19 nt, Artificial Sequence
  Description of Artificial Sequence:  siNA antisense region
cguugccugguuuaucuuc

SEQ ID NO: 1443 - RNA, 19 nt, Artificial Sequence
  Description of Artificial Sequence:  siNA antisense region
caacaccucgaacacuuac

SEQ ID NO: 1444 - RNA, 19 nt, Artificial Sequence
  Description of Artificial Sequence:  siNA antisense region
gcaaauccuucccaucuuc

SEQ ID NO: 1445 - RNA, 19 nt, Artificial Sequence
  Description of Artificial Sequence:  siNA antisense region
uuggauagacucagcccug

SEQ ID NO: 1446 - RNA, 19 nt, Artificial Sequence
  Description of Artificial Sequence:  siNA antisense region
cguccuaaacaaagccucu

SEQ ID NO: 1447 - RNA, 19 nt, Artificial Sequence
  Description of Artificial Sequence:  siNA antisense region
ggcuuggcuugggacccac

SEQ ID NO: 1448 - RNA, 19 nt, Artificial Sequence
  Description of Artificial Sequence:  siNA antisense region
uccgaauuccacacuuaag

SEQ ID NO: 1449 - RNA, 19 nt, Artificial Sequence
  Description of Artificial Sequence:  siNA antisense region
agucuuccuuucuaucaau

SEQ ID NO: 1450 - RNA, 19 nt, Artificial Sequence
  Description of Artificial Sequence:  siNA antisense region
ccaaagcaagguaacguua

SEQ ID NO: 1451 - RNA, 19 nt, Artificial Sequence
  Description of Artificial Sequence:  siNA antisense region
ugcaggcuccaguacucuc

SEQ ID NO: 1452 - RNA, 19 nt, Artificial Sequence
  Description of Artificial Sequence:  siNA antisense region
gagcaaacacaaugcauuu

SEQ ID NO: 1453 - RNA, 19 nt, Artificial Sequence
  Description of Artificial Sequence:  siNA antisense region
ccaugcccaccuccaccag

SEQ ID NO: 1454 - RNA, 19 nt, Artificial Sequence
  Description of Artificial Sequence:  siNA antisense region
uacauuucagaacagaccc

SEQ ID NO: 1455 - RNA, 19 nt, Artificial Sequence
  Description of Artificial Sequence:  siNA antisense region
aaccccgucugaacccuuu

SEQ ID NO: 1456 - RNA, 19 nt, Artificial Sequence
  Description of Artificial Sequence:  siNA antisense region
caaccuucuaaaaccagaa

SEQ ID NO: 1457 - RNA, 19 nt, Artificial Sequence
  Description of Artificial Sequence:  siNA antisense region
cccaacucgaagaacacgc

SEQ ID NO: 1458 - RNA, 19 nt, Artificial Sequence
  Description of Artificial Sequence:  siNA antisense region
caacgaacucuacuuuagc

SEQ ID NO: 1459 - RNA, 19 nt, Artificial Sequence
  Description of Artificial Sequence:  siNA antisense region
uaggagucagaaacagcac

SEQ ID NO: 1460 - RNA, 19 nt, Artificial Sequence
  Description of Artificial Sequence:  siNA antisense region
ucuggaaggaacucucauu

SEQ ID NO: 1461 - RNA, 19 nt, Artificial Sequence
  Description of Artificial Sequence:  siNA antisense region
caaggagacagcuaacggu

SEQ ID NO: 1462 - RNA, 19 nt, Artificial Sequence
  Description of Artificial Sequence:  siNA antisense region
uuucuuccuggggcuuggc

SEQ ID NO: 1463 - RNA, 19 nt, Artificial Sequence
  Description of Artificial Sequence:  siNA antisense region
gagccagagcugcaucauu

SEQ ID NO: 1464 - RNA, 19 nt, Artificial Sequence
  Description of Artificial Sequence:  siNA antisense region
aucagccugggagacaagg

SEQ ID NO: 1465 - RNA, 19 nt, Artificial Sequence
  Description of Artificial Sequence:  siNA antisense region
ugguauucugaauaaagga

SEQ ID NO: 1466 - RNA, 19 nt, Artificial Sequence
  Description of Artificial Sequence:  siNA antisense region
cugaauguccuuucuuugu

SEQ ID NO: 1467 - RNA, 19 nt, Artificial Sequence
  Description of Artificial Sequence:  siNA antisense region
acggcagggagccuugagc

SEQ ID NO: 1468 - RNA, 19 nt, Artificial Sequence
  Description of Artificial Sequence:  siNA antisense region
cagucagaacucuucaaca

SEQ ID NO: 1469 - RNA, 19 nt, Artificial Sequence
  Description of Artificial Sequence:  siNA antisense region
accagaagcugguuugugc

SEQ ID NO: 1470 - RNA, 19 nt, Artificial Sequence
  Description of Artificial Sequence:  siNA antisense region
guauucauuccagaagaaa

SEQ ID NO: 1471 - RNA, 19 nt, Artificial Sequence
  Description of Artificial Sequence:  siNA antisense region
aucaggacagauaugaggg

SEQ ID NO: 1472 - RNA, 19 nt, Artificial Sequence
  Description of Artificial Sequence:  siNA antisense region
cagucucagacauaucaca

SEQ ID NO: 1473 - RNA, 19 nt, Artificial Sequence
  Description of Artificial Sequence:  siNA antisense region
cauugaaccucccgcauuc

SEQ ID NO: 1474 - RNA, 19 nt, Artificial Sequence
  Description of Artificial Sequence:  siNA antisense region
acaccacacacagcuucac

SEQ ID NO: 1475 - RNA, 19 nt, Artificial Sequence
  Description of Artificial Sequence:  siNA antisense region
auccuuccugaaacuuuga

SEQ ID NO: 1476 - RNA, 19 nt, Artificial Sequence
  Description of Artificial Sequence:  siNA antisense region
gaagaacaaaaggguaaaa

SEQ ID NO: 1477 - RNA, 19 nt, Artificial Sequence
  Description of Artificial Sequence:  siNA antisense region
guggguuggggacaggggg

SEQ ID NO: 1478 - RNA, 19 nt, Artificial Sequence
  Description of Artificial Sequence:  siNA antisense region
auggguugcggggugagag

SEQ ID NO: 1479 - RNA, 19 nt, Artificial Sequence
  Description of Artificial Sequence:  siNA antisense region
caaauaacuaaaauacuga

SEQ ID NO: 1480 - RNA, 19 nt, Artificial Sequence
  Description of Artificial Sequence:  siNA antisense region
guuuacuggaguagaggcc

SEQ ID NO: 1481 - RNA, 19 nt, Artificial Sequence
  Description of Artificial Sequence:  siNA antisense region
gugaacaaacccaaucagg

SEQ ID NO: 1482 - RNA, 19 nt, Artificial Sequence
  Description of Artificial Sequence:  siNA antisense region
cuaauaaucauucagagag

SEQ ID NO: 1483 - RNA, 19 nt, Artificial Sequence
  Description of Artificial Sequence:  siNA antisense region
aauaauuuugaagucuggc

SEQ ID NO: 1484 - RNA, 19 nt, Artificial Sequence
  Description of Artificial Sequence:  siNA antisense region
uuauaauuugggcuauaaa

SEQ ID NO: 1485 - RNA, 19 nt, Artificial Sequence
  Description of Artificial Sequence:  siNA antisense region
uaaauaauacaauagaugu

SEQ ID NO: 1486 - RNA, 19 nt, Artificial Sequence
  Description of Artificial Sequence:  siNA antisense region
cucuauauguuaaaagucu

SEQ ID NO: 1487 - RNA, 19 nt, Artificial Sequence
  Description of Artificial Sequence:  siNA antisense region
aaaaaucaguagaaauagc

SEQ ID NO: 1488 - RNA, 19 nt, Artificial Sequence
  Description of Artificial Sequence:  siNA antisense region
aaaggacagaacaagggca

SEQ ID NO: 1489 - RNA, 19 nt, Artificial Sequence
  Description of Artificial Sequence:  siNA antisense region
cauuuucuuuuuugaaaaa

SEQ ID NO: 1490 - RNA, 19 nt, Artificial Sequence
  Description of Artificial Sequence:  siNA antisense region
gguaccaaacaaaaaacac

SEQ ID NO: 1491 - RNA, 19 nt, Artificial Sequence
  Description of Artificial Sequence:  siNA antisense region
cccagcauuucacacuaug

SEQ ID NO: 1492 - RNA, 19 nt, Artificial Sequence
  Description of Artificial Sequence:  siNA antisense region
ugucuuauagucauuguuc

SEQ ID NO: 1493 - RNA, 19 nt, Artificial Sequence
  Description of Artificial Sequence:  siNA antisense region
aauauaugugccauagcau

SEQ ID NO: 1494 - RNA, 19 nt, Artificial Sequence
  Description of Artificial Sequence:  siNA antisense region
cuacauaaacagacuauaa

SEQ ID NO: 1495 - RNA, 19 nt, Artificial Sequence
  Description of Artificial Sequence:  siNA antisense region
aauauauuacauuuguuuc

SEQ ID NO: 1496 - RNA, 19 nt, Artificial Sequence
  Description of Artificial Sequence:  siNA antisense region
cauuauauauaaggcuuua

SEQ ID NO: 1497 - RNA, 19 nt, Artificial Sequence
  Description of Artificial Sequence:  siNA antisense region
ugugaauaguacaaaguuc

SEQ ID NO: 1498 - RNA, 19 nt, Artificial Sequence
  Description of Artificial Sequence:  siNA antisense region
cauaauacugauacaaaau

SEQ ID NO: 1499 - RNA, 19 nt, Artificial Sequence
  Description of Artificial Sequence:  siNA antisense region
augaccuuuguuaugcuac

SEQ ID NO: 1500 - RNA, 19 nt, Artificial Sequence
  Description of Artificial Sequence:  siNA antisense region
ucaauugcugaaagcauua

SEQ ID NO: 1501 - RNA, 19 nt, Artificial Sequence
  Description of Artificial Sequence:  siNA antisense region
uucuuuaauaaaaugacau

SEQ ID NO: 1502 - RNA, 19 nt, Artificial Sequence
  Description of Artificial Sequence:  siNA antisense region
ucaaguuuuucaauguucu

SEQ ID NO: 1503 - RNA, 19 nt, Artificial Sequence
  Description of Artificial Sequence:  Target Sequence/siNA sense region
acccacgcgcagcggccgg

SEQ ID NO: 1504 - RNA, 19 nt, Artificial Sequence
  Description of Artificial Sequence:  Target Sequence/siNA sense region
gagaugcagcggggcgccg

SEQ ID NO: 1505 - RNA, 19 nt, Artificial Sequence
  Description of Artificial Sequence:  Target Sequence/siNA sense region
gcgcugugccugcgacugu

SEQ ID NO: 1506 - RNA, 19 nt, Artificial Sequence
  Description of Artificial Sequence:  Target Sequence/siNA sense region
uggcucugccugggacucc

SEQ ID NO: 1507 - RNA, 19 nt, Artificial Sequence
  Description of Artificial Sequence:  Target Sequence/siNA sense region
cuggacggccuggugagug

SEQ ID NO: 1508 - RNA, 19 nt, Artificial Sequence
  Description of Artificial Sequence:  Target Sequence/siNA sense region
gacuacuccaugacccccc

SEQ ID NO: 1509 - RNA, 19 nt, Artificial Sequence
  Description of Artificial Sequence:  Target Sequence/siNA sense region
ccgaccuugaacaucacgg

SEQ ID NO: 1510 - RNA, 19 nt, Artificial Sequence
  Description of Artificial Sequence:  Target Sequence/siNA sense region
gaggagucacacgucaucg

SEQ ID NO: 1511 - RNA, 19 nt, Artificial Sequence
  Description of Artificial Sequence:  Target Sequence/siNA sense region
gacaccggugacagccugu

SEQ ID NO: 1512 - RNA, 19 nt, Artificial Sequence
  Description of Artificial Sequence:  Target Sequence/siNA sense region
uccaucuccugcaggggac

SEQ ID NO: 1513 - RNA, 19 nt, Artificial Sequence
  Description of Artificial Sequence:  Target Sequence/siNA sense region
cagcacccccucgaguggg

SEQ ID NO: 1514 - RNA, 19 nt, Artificial Sequence
  Description of Artificial Sequence:  Target Sequence/siNA sense region
gcuuggccaggagcucagg

SEQ ID NO: 1515 - RNA, 19 nt, Artificial Sequence
  Description of Artificial Sequence:  Target Sequence/siNA sense region
gaggcgccagccaccggag

SEQ ID NO: 1516 - RNA, 19 nt, Artificial Sequence
  Description of Artificial Sequence:  Target Sequence/siNA sense region
gacaaggacagcgaggaca

SEQ ID NO: 1517 - RNA, 19 nt, Artificial Sequence
  Description of Artificial Sequence:  Target Sequence/siNA sense region
acggggguggugcgagacu

SEQ ID NO: 1518 - RNA, 19 nt, Artificial Sequence
  Description of Artificial Sequence:  Target Sequence/siNA sense region
ugcgagggcacagacgcca

SEQ ID NO: 1519 - RNA, 19 nt, Artificial Sequence
  Description of Artificial Sequence:  Target Sequence/siNA sense region
aggcccuacugcaaggugu

SEQ ID NO: 1520 - RNA, 19 nt, Artificial Sequence
  Description of Artificial Sequence:  Target Sequence/siNA sense region
uugcugcugcacgagguac

SEQ ID NO: 1521 - RNA, 19 nt, Artificial Sequence
  Description of Artificial Sequence:  Target Sequence/siNA sense region
caugccaacgacacaggca

SEQ ID NO: 1522 - RNA, 19 nt, Artificial Sequence
  Description of Artificial Sequence:  Target Sequence/siNA sense region
agcuacgucugcuacuaca

SEQ ID NO: 1523 - RNA, 19 nt, Artificial Sequence
  Description of Artificial Sequence:  Target Sequence/siNA sense region
aaguacaucaaggcacgca

SEQ ID NO: 1524 - RNA, 19 nt, Artificial Sequence
  Description of Artificial Sequence:  Target Sequence/siNA sense region
aucgagggcaccacggccg

SEQ ID NO: 1525 - RNA, 19 nt, Artificial Sequence
  Description of Artificial Sequence:  Target Sequence/siNA sense region
gccagcuccuacguguucg

SEQ ID NO: 1526 - RNA, 19 nt, Artificial Sequence
  Description of Artificial Sequence:  Target Sequence/siNA sense region
gugagagacuuugagcagc

SEQ ID NO: 1527 - RNA, 19 nt, Artificial Sequence
  Description of Artificial Sequence:  Target Sequence/siNA sense region
ccauucaucaacaagccug

SEQ ID NO: 1528 - RNA, 19 nt, Artificial Sequence
  Description of Artificial Sequence:  Target Sequence/siNA sense region
gacacgcucuuggucaaca

SEQ ID NO: 1529 - RNA, 19 nt, Artificial Sequence
  Description of Artificial Sequence:  Target Sequence/siNA sense region
aggaaggacgccauguggg

SEQ ID NO: 1530 - RNA, 19 nt, Artificial Sequence
  Description of Artificial Sequence:  Target Sequence/siNA sense region
gugcccugucuggugucca

SEQ ID NO: 1531 - RNA, 19 nt, Artificial Sequence
  Description of Artificial Sequence:  Target Sequence/siNA sense region
auccccggccucaauguca

SEQ ID NO: 1532 - RNA, 19 nt, Artificial Sequence
  Description of Artificial Sequence:  Target Sequence/siNA sense region
acgcugcgcucgcaaagcu

SEQ ID NO: 1533 - RNA, 19 nt, Artificial Sequence
  Description of Artificial Sequence:  Target Sequence/siNA sense region
ucggugcuguggccagacg

SEQ ID NO: 1534 - RNA, 19 nt, Artificial Sequence
  Description of Artificial Sequence:  Target Sequence/siNA sense region
gggcaggaggugguguggg

SEQ ID NO: 1535 - RNA, 19 nt, Artificial Sequence
  Description of Artificial Sequence:  Target Sequence/siNA sense region
gaugaccggcggggcaugc

SEQ ID NO: 1536 - RNA, 19 nt, Artificial Sequence
  Description of Artificial Sequence:  Target Sequence/siNA sense region
cucguguccacgccacugc

SEQ ID NO: 1537 - RNA, 19 nt, Artificial Sequence
  Description of Artificial Sequence:  Target Sequence/siNA sense region
cugcacgaugcccuguacc

SEQ ID NO: 1538 - RNA, 19 nt, Artificial Sequence
  Description of Artificial Sequence:  Target Sequence/siNA sense region
cugcagugcgagaccaccu

SEQ ID NO: 1539 - RNA, 19 nt, Artificial Sequence
  Description of Artificial Sequence:  Target Sequence/siNA sense region
uggggagaccaggacuucc

SEQ ID NO: 1540 - RNA, 19 nt, Artificial Sequence
  Description of Artificial Sequence:  Target Sequence/siNA sense region
cuuuccaaccccuuccugg

SEQ ID NO: 1541 - RNA, 19 nt, Artificial Sequence
  Description of Artificial Sequence:  Target Sequence/siNA sense region
gugcacaucacaggcaacg

SEQ ID NO: 1542 - RNA, 19 nt, Artificial Sequence
  Description of Artificial Sequence:  Target Sequence/siNA sense region
gagcucuaugacauccagc

SEQ ID NO: 1543 - RNA, 19 nt, Artificial Sequence
  Description of Artificial Sequence:  Target Sequence/siNA sense region
cuguugcccaggaagucgc

SEQ ID NO: 1544 - RNA, 19 nt, Artificial Sequence
  Description of Artificial Sequence:  Target Sequence/siNA sense region
cuggagcugcugguagggg

SEQ ID NO: 1545 - RNA, 19 nt, Artificial Sequence
  Description of Artificial Sequence:  Target Sequence/siNA sense region
gagaagcugguccucaacu

SEQ ID NO: 1546 - RNA, 19 nt, Artificial Sequence
  Description of Artificial Sequence:  Target Sequence/siNA sense region
ugcaccgugugggcugagu

SEQ ID NO: 1547 - RNA, 19 nt, Artificial Sequence
  Description of Artificial Sequence:  Target Sequence/siNA sense region
uuuaacucaggugucaccu

SEQ ID NO: 1548 - RNA, 19 nt, Artificial Sequence
  Description of Artificial Sequence:  Target Sequence/siNA sense region
uuugacugggacuacccag

SEQ ID NO: 1549 - RNA, 19 nt, Artificial Sequence
  Description of Artificial Sequence:  Target Sequence/siNA sense region
gggaagcaggcagagcggg

SEQ ID NO: 1550 - RNA, 19 nt, Artificial Sequence
  Description of Artificial Sequence:  Target Sequence/siNA sense region
gguaagugggugcccgagc

SEQ ID NO: 1551 - RNA, 19 nt, Artificial Sequence
  Description of Artificial Sequence:  Target Sequence/siNA sense region
cgacgcucccaacagaccc

SEQ ID NO: 1552 - RNA, 19 nt, Artificial Sequence
  Description of Artificial Sequence:  Target Sequence/siNA sense region
cacacagaacucuccagca

SEQ ID NO: 1553 - RNA, 19 nt, Artificial Sequence
  Description of Artificial Sequence:  Target Sequence/siNA sense region
auccugaccauccacaacg

SEQ ID NO: 1554 - RNA, 19 nt, Artificial Sequence
  Description of Artificial Sequence:  Target Sequence/siNA sense region
gucagccagcacgaccugg

SEQ ID NO: 1555 - RNA, 19 nt, Artificial Sequence
  Description of Artificial Sequence:  Target Sequence/siNA sense region
ggcucguaugugugcaagg

SEQ ID NO: 1556 - RNA, 19 nt, Artificial Sequence
  Description of Artificial Sequence:  Target Sequence/siNA sense region
gccaacaacggcauccagc

SEQ ID NO: 1557 - RNA, 19 nt, Artificial Sequence
  Description of Artificial Sequence:  Target Sequence/siNA sense region
cgauuucgggagagcaccg

SEQ ID NO: 1558 - RNA, 19 nt, Artificial Sequence
  Description of Artificial Sequence:  Target Sequence/siNA sense region
gaggucauugugcaugaaa

SEQ ID NO: 1559 - RNA, 19 nt, Artificial Sequence
  Description of Artificial Sequence:  Target Sequence/siNA sense region
aaucccuucaucagcgucg

SEQ ID NO: 1560 - RNA, 19 nt, Artificial Sequence
  Description of Artificial Sequence:  Target Sequence/siNA sense region
gaguggcucaaaggaccca

SEQ ID NO: 1561 - RNA, 19 nt, Artificial Sequence
  Description of Artificial Sequence:  Target Sequence/siNA sense region
auccuggaggccacggcag

SEQ ID NO: 1562 - RNA, 19 nt, Artificial Sequence
  Description of Artificial Sequence:  Target Sequence/siNA sense region
ggagacgagcuggugaagc

SEQ ID NO: 1563 - RNA, 19 nt, Artificial Sequence
  Description of Artificial Sequence:  Target Sequence/siNA sense region
cugcccgugaagcuggcag

SEQ ID NO: 1564 - RNA, 19 nt, Artificial Sequence
  Description of Artificial Sequence:  Target Sequence/siNA sense region
gcguaccccccgcccgagu

SEQ ID NO: 1565 - RNA, 19 nt, Artificial Sequence
  Description of Artificial Sequence:  Target Sequence/siNA sense region
uuccagugguacaaggaug

SEQ ID NO: 1566 - RNA, 19 nt, Artificial Sequence
  Description of Artificial Sequence:  Target Sequence/siNA sense region
ggaaaggcacuguccgggc

SEQ ID NO: 1567 - RNA, 19 nt, Artificial Sequence
  Description of Artificial Sequence:  Target Sequence/siNA sense region
cgccacaguccacaugccc

SEQ ID NO: 1568 - RNA, 19 nt, Artificial Sequence
  Description of Artificial Sequence:  Target Sequence/siNA sense region
cuggugcucaaggagguga

SEQ ID NO: 1569 - RNA, 19 nt, Artificial Sequence
  Description of Artificial Sequence:  Target Sequence/siNA sense region
acagaggccagcacaggca

SEQ ID NO: 1570 - RNA, 19 nt, Artificial Sequence
  Description of Artificial Sequence:  Target Sequence/siNA sense region
accuacacccucgcccugu

SEQ ID NO: 1571 - RNA, 19 nt, Artificial Sequence
  Description of Artificial Sequence:  Target Sequence/siNA sense region
uggaacuccgcugcuggcc

SEQ ID NO: 1572 - RNA, 19 nt, Artificial Sequence
  Description of Artificial Sequence:  Target Sequence/siNA sense region
cugaggcgcaacaucagcc

SEQ ID NO: 1573 - RNA, 19 nt, Artificial Sequence
  Description of Artificial Sequence:  Target Sequence/siNA sense region
cuggagcugguggugaaug

SEQ ID NO: 1574 - RNA, 19 nt, Artificial Sequence
  Description of Artificial Sequence:  Target Sequence/siNA sense region
gugcccccccagauacaug

SEQ ID NO: 1575 - RNA, 19 nt, Artificial Sequence
  Description of Artificial Sequence:  Target Sequence/siNA sense region
gagaaggaggccuccuccc

SEQ ID NO: 1576 - RNA, 19 nt, Artificial Sequence
  Description of Artificial Sequence:  Target Sequence/siNA sense region
cccagcaucuacucgcguc

SEQ ID NO: 1577 - RNA, 19 nt, Artificial Sequence
  Description of Artificial Sequence:  Target Sequence/siNA sense region
cacagccgccaggcccuca

SEQ ID NO: 1578 - RNA, 19 nt, Artificial Sequence
  Description of Artificial Sequence:  Target Sequence/siNA sense region
accugcacggccuacgggg

SEQ ID NO: 1579 - RNA, 19 nt, Artificial Sequence
  Description of Artificial Sequence:  Target Sequence/siNA sense region
gugccccugccucucagca

SEQ ID NO: 1580 - RNA, 19 nt, Artificial Sequence
  Description of Artificial Sequence:  Target Sequence/siNA sense region
auccaguggcacuggcggc

SEQ ID NO: 1581 - RNA, 19 nt, Artificial Sequence
  Description of Artificial Sequence:  Target Sequence/siNA sense region
cccuggacacccugcaaga

SEQ ID NO: 1582 - RNA, 19 nt, Artificial Sequence
  Description of Artificial Sequence:  Target Sequence/siNA sense region
auguuugcccagcguaguc

SEQ ID NO: 1583 - RNA, 19 nt, Artificial Sequence
  Description of Artificial Sequence:  Target Sequence/siNA sense region
cuccggcggcggcagcagc

SEQ ID NO: 1584 - RNA, 19 nt, Artificial Sequence
  Description of Artificial Sequence:  Target Sequence/siNA sense region
caagaccucaugccacagu

SEQ ID NO: 1585 - RNA, 19 nt, Artificial Sequence
  Description of Artificial Sequence:  Target Sequence/siNA sense region
ugccgugacuggagggcgg

SEQ ID NO: 1586 - RNA, 19 nt, Artificial Sequence
  Description of Artificial Sequence:  Target Sequence/siNA sense region
gugaccacgcaggaugccg

SEQ ID NO: 1587 - RNA, 19 nt, Artificial Sequence
  Description of Artificial Sequence:  Target Sequence/siNA sense region
gugaaccccaucgagagcc

SEQ ID NO: 1588 - RNA, 19 nt, Artificial Sequence
  Description of Artificial Sequence:  Target Sequence/siNA sense region
cuggacaccuggaccgagu

SEQ ID NO: 1589 - RNA, 19 nt, Artificial Sequence
  Description of Artificial Sequence:  Target Sequence/siNA sense region
uuuguggagggaaagaaua

SEQ ID NO: 1590 - RNA, 19 nt, Artificial Sequence
  Description of Artificial Sequence:  Target Sequence/siNA sense region
aagacugugagcaagcugg

SEQ ID NO: 1591 - RNA, 19 nt, Artificial Sequence
  Description of Artificial Sequence:  Target Sequence/siNA sense region
gugauccagaaugccaacg

SEQ ID NO: 1592 - RNA, 19 nt, Artificial Sequence
  Description of Artificial Sequence:  Target Sequence/siNA sense region
gugucugccauguacaagu

SEQ ID NO: 1593 - RNA, 19 nt, Artificial Sequence
  Description of Artificial Sequence:  Target Sequence/siNA sense region
uguguggucuccaacaagg

SEQ ID NO: 1594 - RNA, 19 nt, Artificial Sequence
  Description of Artificial Sequence:  Target Sequence/siNA sense region
gugggccaggaugagcggc

SEQ ID NO: 1595 - RNA, 19 nt, Artificial Sequence
  Description of Artificial Sequence:  Target Sequence/siNA sense region
cucaucuacuucuauguga

SEQ ID NO: 1596 - RNA, 19 nt, Artificial Sequence
  Description of Artificial Sequence:  Target Sequence/siNA sense region
accaccauccccgacggcu

SEQ ID NO: 1597 - RNA, 19 nt, Artificial Sequence
  Description of Artificial Sequence:  Target Sequence/siNA sense region
uucaccaucgaauccaagc

SEQ ID NO: 1598 - RNA, 19 nt, Artificial Sequence
  Description of Artificial Sequence:  Target Sequence/siNA sense region
ccauccgaggagcuacuag

SEQ ID NO: 1599 - RNA, 19 nt, Artificial Sequence
  Description of Artificial Sequence:  Target Sequence/siNA sense region
gagggccagccggugcucc

SEQ ID NO: 1600 - RNA, 19 nt, Artificial Sequence
  Description of Artificial Sequence:  Target Sequence/siNA sense region
cugagcugccaagccgaca

SEQ ID NO: 1601 - RNA, 19 nt, Artificial Sequence
  Description of Artificial Sequence:  Target Sequence/siNA sense region
agcuacaaguacgagcauc

SEQ ID NO: 1602 - RNA, 19 nt, Artificial Sequence
  Description of Artificial Sequence:  Target Sequence/siNA sense region
cugcgcugguaccgccuca

SEQ ID NO: 1603 - RNA, 19 nt, Artificial Sequence
  Description of Artificial Sequence:  Target Sequence/siNA sense region
aaccuguccacgcugcacg

SEQ ID NO: 1604 - RNA, 19 nt, Artificial Sequence
  Description of Artificial Sequence:  Target Sequence/siNA sense region
gaugcgcacgggaacccgc

SEQ ID NO: 1605 - RNA, 19 nt, Artificial Sequence
  Description of Artificial Sequence:  Target Sequence/siNA sense region
cuucugcucgacugcaaga

SEQ ID NO: 1606 - RNA, 19 nt, Artificial Sequence
  Description of Artificial Sequence:  Target Sequence/siNA sense region
aacgugcaucuguucgcca

SEQ ID NO: 1607 - RNA, 19 nt, Artificial Sequence
  Description of Artificial Sequence:  Target Sequence/siNA sense region
accccucuggccgccagcc

SEQ ID NO: 1608 - RNA, 19 nt, Artificial Sequence
  Description of Artificial Sequence:  Target Sequence/siNA sense region
cuggaggagguggcaccug

SEQ ID NO: 1609 - RNA, 19 nt, Artificial Sequence
  Description of Artificial Sequence:  Target Sequence/siNA sense region
ggggcgcgccacgccacgc

SEQ ID NO: 1610 - RNA, 19 nt, Artificial Sequence
  Description of Artificial Sequence:  Target Sequence/siNA sense region
cucagccugaguauccccc

SEQ ID NO: 1611 - RNA, 19 nt, Artificial Sequence
  Description of Artificial Sequence:  Target Sequence/siNA sense region
cgcgucgcgcccgagcacg

SEQ ID NO: 1612 - RNA, 19 nt, Artificial Sequence
  Description of Artificial Sequence:  Target Sequence/siNA sense region
gagggccacuaugugugcg

SEQ ID NO: 1613 - RNA, 19 nt, Artificial Sequence
  Description of Artificial Sequence:  Target Sequence/siNA sense region
gaagugcaagaccggcgca

SEQ ID NO: 1614 - RNA, 19 nt, Artificial Sequence
  Description of Artificial Sequence:  Target Sequence/siNA sense region
agccaugacaagcacugcc

SEQ ID NO: 1615 - RNA, 19 nt, Artificial Sequence
  Description of Artificial Sequence:  Target Sequence/siNA sense region
cacaagaaguaccugucgg

SEQ ID NO: 1616 - RNA, 19 nt, Artificial Sequence
  Description of Artificial Sequence:  Target Sequence/siNA sense region
gugcaggcccuggaagccc

SEQ ID NO: 1617 - RNA, 19 nt, Artificial Sequence
  Description of Artificial Sequence:  Target Sequence/siNA sense region
ccucggcucacgcagaacu

SEQ ID NO: 1618 - RNA, 19 nt, Artificial Sequence
  Description of Artificial Sequence:  Target Sequence/siNA sense region
uugaccgaccuccugguga

SEQ ID NO: 1619 - RNA, 19 nt, Artificial Sequence
  Description of Artificial Sequence:  Target Sequence/siNA sense region
aacgugagcgacucgcugg

SEQ ID NO: 1620 - RNA, 19 nt, Artificial Sequence
  Description of Artificial Sequence:  Target Sequence/siNA sense region
gagaugcagugcuuggugg

SEQ ID NO: 1621 - RNA, 19 nt, Artificial Sequence
  Description of Artificial Sequence:  Target Sequence/siNA sense region
gccggagcgcacgcgccca

SEQ ID NO: 1622 - RNA, 19 nt, Artificial Sequence
  Description of Artificial Sequence:  Target Sequence/siNA sense region
agcaucgugugguacaaag

SEQ ID NO: 1623 - RNA, 19 nt, Artificial Sequence
  Description of Artificial Sequence:  Target Sequence/siNA sense region
gacgagaggcugcuggagg

SEQ ID NO: 1624 - RNA, 19 nt, Artificial Sequence
  Description of Artificial Sequence:  Target Sequence/siNA sense region
gaaaagucuggagucgacu

SEQ ID NO: 1625 - RNA, 19 nt, Artificial Sequence
  Description of Artificial Sequence:  Target Sequence/siNA sense region
uuggcggacuccaaccaga

SEQ ID NO: 1626 - RNA, 19 nt, Artificial Sequence
  Description of Artificial Sequence:  Target Sequence/siNA sense region
aagcugagcauccagcgcg

SEQ ID NO: 1627 - RNA, 19 nt, Artificial Sequence
  Description of Artificial Sequence:  Target Sequence/siNA sense region
gugcgcgaggaggaugcgg

SEQ ID NO: 1628 - RNA, 19 nt, Artificial Sequence
  Description of Artificial Sequence:  Target Sequence/siNA sense region
ggaccguaucugugcagcg

SEQ ID NO: 1629 - RNA, 19 nt, Artificial Sequence
  Description of Artificial Sequence:  Target Sequence/siNA sense region
gugugcagacccaagggcu

SEQ ID NO: 1630 - RNA, 19 nt, Artificial Sequence
  Description of Artificial Sequence:  Target Sequence/siNA sense region
ugcgucaacuccuccgcca

SEQ ID NO: 1631 - RNA, 19 nt, Artificial Sequence
  Description of Artificial Sequence:  Target Sequence/siNA sense region
agcguggccguggaaggcu

SEQ ID NO: 1632 - RNA, 19 nt, Artificial Sequence
  Description of Artificial Sequence:  Target Sequence/siNA sense region
uccgaggauaagggcagca

SEQ ID NO: 1633 - RNA, 19 nt, Artificial Sequence
  Description of Artificial Sequence:  Target Sequence/siNA sense region
auggagaucgugauccuug

SEQ ID NO: 1634 - RNA, 19 nt, Artificial Sequence
  Description of Artificial Sequence:  Target Sequence/siNA sense region
gucgguaccggcgucaucg

SEQ ID NO: 1635 - RNA, 19 nt, Artificial Sequence
  Description of Artificial Sequence:  Target Sequence/siNA sense region
gcugucuucuucugggucc

SEQ ID NO: 1636 - RNA, 19 nt, Artificial Sequence
  Description of Artificial Sequence:  Target Sequence/siNA sense region
cuccuccuccucaucuucu

SEQ ID NO: 1637 - RNA, 19 nt, Artificial Sequence
  Description of Artificial Sequence:  Target Sequence/siNA sense region
uguaacaugaggaggccgg

SEQ ID NO: 1638 - RNA, 19 nt, Artificial Sequence
  Description of Artificial Sequence:  Target Sequence/siNA sense region
gcccacgcagacaucaaga

SEQ ID NO: 1639 - RNA, 19 nt, Artificial Sequence
  Description of Artificial Sequence:  Target Sequence/siNA sense region
acgggcuaccuguccauca

SEQ ID NO: 1640 - RNA, 19 nt, Artificial Sequence
  Description of Artificial Sequence:  Target Sequence/siNA sense region
aucauggaccccggggagg

SEQ ID NO: 1641 - RNA, 19 nt, Artificial Sequence
  Description of Artificial Sequence:  Target Sequence/siNA sense region
gugccucuggaggagcaau

SEQ ID NO: 1642 - RNA, 19 nt, Artificial Sequence
  Description of Artificial Sequence:  Target Sequence/siNA sense region
ugcgaauaccuguccuacg

SEQ ID NO: 1643 - RNA, 19 nt, Artificial Sequence
  Description of Artificial Sequence:  Target Sequence/siNA sense region
gaugccagccagugggaau

SEQ ID NO: 1644 - RNA, 19 nt, Artificial Sequence
  Description of Artificial Sequence:  Target Sequence/siNA sense region
uucccccgagagcggcugc

SEQ ID NO: 1645 - RNA, 19 nt, Artificial Sequence
  Description of Artificial Sequence:  Target Sequence/siNA sense region
caccuggggagagugcucg

SEQ ID NO: 1646 - RNA, 19 nt, Artificial Sequence
  Description of Artificial Sequence:  Target Sequence/siNA sense region
ggcuacggcgccuucggga

SEQ ID NO: 1647 - RNA, 19 nt, Artificial Sequence
  Description of Artificial Sequence:  Target Sequence/siNA sense region
aaggugguggaagccuccg

SEQ ID NO: 1648 - RNA, 19 nt, Artificial Sequence
  Description of Artificial Sequence:  Target Sequence/siNA sense region
gcuuucggcauccacaagg

SEQ ID NO: 1649 - RNA, 19 nt, Artificial Sequence
  Description of Artificial Sequence:  Target Sequence/siNA sense region
ggcagcagcugugacaccg

SEQ ID NO: 1650 - RNA, 19 nt, Artificial Sequence
  Description of Artificial Sequence:  Target Sequence/siNA sense region
guggccgugaaaaugcuga

SEQ ID NO: 1651 - RNA, 19 nt, Artificial Sequence
  Description of Artificial Sequence:  Target Sequence/siNA sense region
aaagagggcgccacggcca

SEQ ID NO: 1652 - RNA, 19 nt, Artificial Sequence
  Description of Artificial Sequence:  Target Sequence/siNA sense region
agcgagcagcgcgcgcuga

SEQ ID NO: 1653 - RNA, 19 nt, Artificial Sequence
  Description of Artificial Sequence:  Target Sequence/siNA sense region
augucggagcucaagaucc

SEQ ID NO: 1654 - RNA, 19 nt, Artificial Sequence
  Description of Artificial Sequence:  Target Sequence/siNA sense region
cucauucacaucggcaacc

SEQ ID NO: 1655 - RNA, 19 nt, Artificial Sequence
  Description of Artificial Sequence:  Target Sequence/siNA sense region
caccucaacguggucaacc

SEQ ID NO: 1656 - RNA, 19 nt, Artificial Sequence
  Description of Artificial Sequence:  Target Sequence/siNA sense region
cuccucggggcgugcacca

SEQ ID NO: 1657 - RNA, 19 nt, Artificial Sequence
  Description of Artificial Sequence:  Target Sequence/siNA sense region
aagccgcagggcccccuca

SEQ ID NO: 1658 - RNA, 19 nt, Artificial Sequence
  Description of Artificial Sequence:  Target Sequence/siNA sense region
auggugaucguggaguucu

SEQ ID NO: 1659 - RNA, 19 nt, Artificial Sequence
  Description of Artificial Sequence:  Target Sequence/siNA sense region
ugcaaguacggcaaccucu

SEQ ID NO: 1660 - RNA, 19 nt, Artificial Sequence
  Description of Artificial Sequence:  Target Sequence/siNA sense region
uccaacuuccugcgcgcca

SEQ ID NO: 1661 - RNA, 19 nt, Artificial Sequence
  Description of Artificial Sequence:  Target Sequence/siNA sense region
aagcgggacgccuucagcc

SEQ ID NO: 1662 - RNA, 19 nt, Artificial Sequence
  Description of Artificial Sequence:  Target Sequence/siNA sense region
cccugcgcggagaagucuc

SEQ ID NO: 1663 - RNA, 19 nt, Artificial Sequence
  Description of Artificial Sequence:  Target Sequence/siNA sense region
cccgagcagcgcggacgcu

SEQ ID NO: 1664 - RNA, 19 nt, Artificial Sequence
  Description of Artificial Sequence:  Target Sequence/siNA sense region
uuccgcgccaugguggagc

SEQ ID NO: 1665 - RNA, 19 nt, Artificial Sequence
  Description of Artificial Sequence:  Target Sequence/siNA sense region
cucgccaggcuggaucgga

SEQ ID NO: 1666 - RNA, 19 nt, Artificial Sequence
  Description of Artificial Sequence:  Target Sequence/siNA sense region
aggcggccggggagcagcg

SEQ ID NO: 1667 - RNA, 19 nt, Artificial Sequence
  Description of Artificial Sequence:  Target Sequence/siNA sense region
gacaggguccucuucgcgc

SEQ ID NO: 1668 - RNA, 19 nt, Artificial Sequence
  Description of Artificial Sequence:  Target Sequence/siNA sense region
cgguucucgaagaccgagg

SEQ ID NO: 1669 - RNA, 19 nt, Artificial Sequence
  Description of Artificial Sequence:  Target Sequence/siNA sense region
ggcggagcgaggcgggcuu

SEQ ID NO: 1670 - RNA, 19 nt, Artificial Sequence
  Description of Artificial Sequence:  Target Sequence/siNA sense region
ucuccagaccaagaagcug

SEQ ID NO: 1671 - RNA, 19 nt, Artificial Sequence
  Description of Artificial Sequence:  Target Sequence/siNA sense region
gaggaccuguggcugagcc

SEQ ID NO: 1672 - RNA, 19 nt, Artificial Sequence
  Description of Artificial Sequence:  Target Sequence/siNA sense region
ccgcugaccauggaagauc

SEQ ID NO: 1673 - RNA, 19 nt, Artificial Sequence
  Description of Artificial Sequence:  Target Sequence/siNA sense region
cuugucugcuacagcuucc

SEQ ID NO: 1674 - RNA, 19 nt, Artificial Sequence
  Description of Artificial Sequence:  Target Sequence/siNA sense region
cagguggccagagggaugg

SEQ ID NO: 1675 - RNA, 19 nt, Artificial Sequence
  Description of Artificial Sequence:  Target Sequence/siNA sense region
gaguuccuggcuucccgaa

SEQ ID NO: 1676 - RNA, 19 nt, Artificial Sequence
  Description of Artificial Sequence:  Target Sequence/siNA sense region
aagugcauccacagagacc

SEQ ID NO: 1677 - RNA, 19 nt, Artificial Sequence
  Description of Artificial Sequence:  Target Sequence/siNA sense region
cuggcugcucggaacauuc

SEQ ID NO: 1678 - RNA, 19 nt, Artificial Sequence
  Description of Artificial Sequence:  Target Sequence/siNA sense region
cugcugucggaaagcgacg

SEQ ID NO: 1679 - RNA, 19 nt, Artificial Sequence
  Description of Artificial Sequence:  Target Sequence/siNA sense region
guggugaagaucugugacu

SEQ ID NO: 1680 - RNA, 19 nt, Artificial Sequence
  Description of Artificial Sequence:  Target Sequence/siNA sense region
uuuggccuugcccgggaca

SEQ ID NO: 1681 - RNA, 19 nt, Artificial Sequence
  Description of Artificial Sequence:  Target Sequence/siNA sense region
aucuacaaagaccccgacu

SEQ ID NO: 1682 - RNA, 19 nt, Artificial Sequence
  Description of Artificial Sequence:  Target Sequence/siNA sense region
uacguccgcaagggcagug

SEQ ID NO: 1683 - RNA, 19 nt, Artificial Sequence
  Description of Artificial Sequence:  Target Sequence/siNA sense region
gcccggcugccccugaagu

SEQ ID NO: 1684 - RNA, 19 nt, Artificial Sequence
  Description of Artificial Sequence:  Target Sequence/siNA sense region
uggauggccccugaaagca

SEQ ID NO: 1685 - RNA, 19 nt, Artificial Sequence
  Description of Artificial Sequence:  Target Sequence/siNA sense region
aucuucgacaagguguaca

SEQ ID NO: 1686 - RNA, 19 nt, Artificial Sequence
  Description of Artificial Sequence:  Target Sequence/siNA sense region
accacgcagagugacgugu

SEQ ID NO: 1687 - RNA, 19 nt, Artificial Sequence
  Description of Artificial Sequence:  Target Sequence/siNA sense region
ugguccuuuggggugcuuc

SEQ ID NO: 1688 - RNA, 19 nt, Artificial Sequence
  Description of Artificial Sequence:  Target Sequence/siNA sense region
cucugggagaucuucucuc

SEQ ID NO: 1689 - RNA, 19 nt, Artificial Sequence
  Description of Artificial Sequence:  Target Sequence/siNA sense region
cugggggccuccccguacc

SEQ ID NO: 1690 - RNA, 19 nt, Artificial Sequence
  Description of Artificial Sequence:  Target Sequence/siNA sense region
ccuggggugcagaucaaug

SEQ ID NO: 1691 - RNA, 19 nt, Artificial Sequence
  Description of Artificial Sequence:  Target Sequence/siNA sense region
gaggaguucugccagcgcg

SEQ ID NO: 1692 - RNA, 19 nt, Artificial Sequence
  Description of Artificial Sequence:  Target Sequence/siNA sense region
gugagagacggcacaagga

SEQ ID NO: 1693 - RNA, 19 nt, Artificial Sequence
  Description of Artificial Sequence:  Target Sequence/siNA sense region
augagggccccggagcugg

SEQ ID NO: 1694 - RNA, 19 nt, Artificial Sequence
  Description of Artificial Sequence:  Target Sequence/siNA sense region
gccacucccgccauacgcc

SEQ ID NO: 1695 - RNA, 19 nt, Artificial Sequence
  Description of Artificial Sequence:  Target Sequence/siNA sense region
cacaucaugcugaacugcu

SEQ ID NO: 1696 - RNA, 19 nt, Artificial Sequence
  Description of Artificial Sequence:  Target Sequence/siNA sense region
ugguccggagaccccaagg

SEQ ID NO: 1697 - RNA, 19 nt, Artificial Sequence
  Description of Artificial Sequence:  Target Sequence/siNA sense region
gcgagaccugcauucucgg

SEQ ID NO: 1698 - RNA, 19 nt, Artificial Sequence
  Description of Artificial Sequence:  Target Sequence/siNA sense region
gaccugguggagauccugg

SEQ ID NO: 1699 - RNA, 19 nt, Artificial Sequence
  Description of Artificial Sequence:  Target Sequence/siNA sense region
ggggaccugcuccagggca

SEQ ID NO: 1700 - RNA, 19 nt, Artificial Sequence
  Description of Artificial Sequence:  Target Sequence/siNA sense region
aggggccugcaagaggaag

SEQ ID NO: 1701 - RNA, 19 nt, Artificial Sequence
  Description of Artificial Sequence:  Target Sequence/siNA sense region
gaggaggucugcauggccc

SEQ ID NO: 1702 - RNA, 19 nt, Artificial Sequence
  Description of Artificial Sequence:  Target Sequence/siNA sense region
ccgcgcagcucucagagcu

SEQ ID NO: 1703 - RNA, 19 nt, Artificial Sequence
  Description of Artificial Sequence:  Target Sequence/siNA sense region
ucagaagagggcagcuucu

SEQ ID NO: 1704 - RNA, 19 nt, Artificial Sequence
  Description of Artificial Sequence:  Target Sequence/siNA sense region
ucgcagguguccaccaugg

SEQ ID NO: 1705 - RNA, 19 nt, Artificial Sequence
  Description of Artificial Sequence:  Target Sequence/siNA sense region
gcccuacacaucgcccagg

SEQ ID NO: 1706 - RNA, 19 nt, Artificial Sequence
  Description of Artificial Sequence:  Target Sequence/siNA sense region
gcugacgcugaggacagcc

SEQ ID NO: 1707 - RNA, 19 nt, Artificial Sequence
  Description of Artificial Sequence:  Target Sequence/siNA sense region
ccgccaagccugcagcgcc

SEQ ID NO: 1708 - RNA, 19 nt, Artificial Sequence
  Description of Artificial Sequence:  Target Sequence/siNA sense region
cacagccuggccgccaggu

SEQ ID NO: 1709 - RNA, 19 nt, Artificial Sequence
  Description of Artificial Sequence:  Target Sequence/siNA sense region
uauuacaacuggguguccu

SEQ ID NO: 1710 - RNA, 19 nt, Artificial Sequence
  Description of Artificial Sequence:  Target Sequence/siNA sense region
uuucccgggugccuggcca

SEQ ID NO: 1711 - RNA, 19 nt, Artificial Sequence
  Description of Artificial Sequence:  Target Sequence/siNA sense region
agaggggcugagacccgug

SEQ ID NO: 1712 - RNA, 19 nt, Artificial Sequence
  Description of Artificial Sequence:  Target Sequence/siNA sense region
gguuccuccaggaugaaga

SEQ ID NO: 1713 - RNA, 19 nt, Artificial Sequence
  Description of Artificial Sequence:  Target Sequence/siNA sense region
acauuugaggaauucccca

SEQ ID NO: 1714 - RNA, 19 nt, Artificial Sequence
  Description of Artificial Sequence:  Target Sequence/siNA sense region
augaccccaacgaccuaca

SEQ ID NO: 1715 - RNA, 19 nt, Artificial Sequence
  Description of Artificial Sequence:  Target Sequence/siNA sense region
aaaggcucuguggacaacc

SEQ ID NO: 1716 - RNA, 19 nt, Artificial Sequence
  Description of Artificial Sequence:  Target Sequence/siNA sense region
cagacagacagugggaugg

SEQ ID NO: 1717 - RNA, 19 nt, Artificial Sequence
  Description of Artificial Sequence:  Target Sequence/siNA sense region
gugcuggccucggaggagu

SEQ ID NO: 1718 - RNA, 19 nt, Artificial Sequence
  Description of Artificial Sequence:  Target Sequence/siNA sense region
uuugagcagauagagagca

SEQ ID NO: 1719 - RNA, 19 nt, Artificial Sequence
  Description of Artificial Sequence:  Target Sequence/siNA sense region
aggcauagacaagaaagcg

SEQ ID NO: 1720 - RNA, 19 nt, Artificial Sequence
  Description of Artificial Sequence:  Target Sequence/siNA sense region
ggcuucagguagcugaagc

SEQ ID NO: 1721 - RNA, 19 nt, Artificial Sequence
  Description of Artificial Sequence:  Target Sequence/siNA sense region
cagagagagagaaggcagc

SEQ ID NO: 1722 - RNA, 19 nt, Artificial Sequence
  Description of Artificial Sequence:  Target Sequence/siNA sense region
cauacgucagcauuuucuu

SEQ ID NO: 1723 - RNA, 19 nt, Artificial Sequence
  Description of Artificial Sequence:  Target Sequence/siNA sense region
ucucugcacuuauaagaaa

SEQ ID NO: 1724 - RNA, 19 nt, Artificial Sequence
  Description of Artificial Sequence:  Target Sequence/siNA sense region
agaucaaagacuuuaagac

SEQ ID NO: 1725 - RNA, 19 nt, Artificial Sequence
  Description of Artificial Sequence:  Target Sequence/siNA sense region
cuuucgcuauuucuucuac

SEQ ID NO: 1726 - RNA, 19 nt, Artificial Sequence
  Description of Artificial Sequence:  Target Sequence/siNA sense region
cugcuaucuacuacaaacu

SEQ ID NO: 1727 - RNA, 19 nt, Artificial Sequence
  Description of Artificial Sequence:  Target Sequence/siNA sense region
uucaaagaggaaccaggag

SEQ ID NO: 1728 - RNA, 19 nt, Artificial Sequence
  Description of Artificial Sequence:  Target Sequence/siNA sense region
ggacaagaggagcaugaaa

SEQ ID NO: 1729 - RNA, 19 nt, Artificial Sequence
  Description of Artificial Sequence:  Target Sequence/siNA sense region
aguggacaaggagugugac

SEQ ID NO: 1730 - RNA, 19 nt, Artificial Sequence
  Description of Artificial Sequence:  Target Sequence/siNA sense region
ccacugaagcaccacaggg

SEQ ID NO: 1731 - RNA, 19 nt, Artificial Sequence
  Description of Artificial Sequence:  Target Sequence/siNA sense region
gagggguuaggccuccgga

SEQ ID NO: 1732 - RNA, 19 nt, Artificial Sequence
  Description of Artificial Sequence:  Target Sequence/siNA sense region
augacugcgggcaggccug

SEQ ID NO: 1733 - RNA, 19 nt, Artificial Sequence
  Description of Artificial Sequence:  Target Sequence/siNA sense region
ggauaauauccagccuccc

SEQ ID NO: 1734 - RNA, 19 nt, Artificial Sequence
  Description of Artificial Sequence:  Target Sequence/siNA sense region
cacaagaagcugguggagc

SEQ ID NO: 1735 - RNA, 19 nt, Artificial Sequence
  Description of Artificial Sequence:  Target Sequence/siNA sense region
cagaguguucccugacucc

SEQ ID NO: 1736 - RNA, 19 nt, Artificial Sequence
  Description of Artificial Sequence:  Target Sequence/siNA sense region
cuccaaggaaagggagacg

SEQ ID NO: 1737 - RNA, 19 nt, Artificial Sequence
  Description of Artificial Sequence:  Target Sequence/siNA sense region
gcccuuucauggucugcug

SEQ ID NO: 1738 - RNA, 19 nt, Artificial Sequence
  Description of Artificial Sequence:  Target Sequence/siNA sense region
gaguaacaggugccuuccc

SEQ ID NO: 1739 - RNA, 19 nt, Artificial Sequence
  Description of Artificial Sequence:  Target Sequence/siNA sense region
cagacacuggcguuacugc

SEQ ID NO: 1740 - RNA, 19 nt, Artificial Sequence
  Description of Artificial Sequence:  Target Sequence/siNA sense region
cuugaccaaagagcccuca

SEQ ID NO: 1741 - RNA, 19 nt, Artificial Sequence
  Description of Artificial Sequence:  Target Sequence/siNA sense region
aagcggcccuuaugccagc

SEQ ID NO: 1742 - RNA, 19 nt, Artificial Sequence
  Description of Artificial Sequence:  Target Sequence/siNA sense region
cgugacagagggcucaccu

SEQ ID NO: 1743 - RNA, 19 nt, Artificial Sequence
  Description of Artificial Sequence:  Target Sequence/siNA sense region
ucuugccuucuaggucacu

SEQ ID NO: 1744 - RNA, 19 nt, Artificial Sequence
  Description of Artificial Sequence:  Target Sequence/siNA sense region
uucucacaaugucccuuca

SEQ ID NO: 1745 - RNA, 19 nt, Artificial Sequence
  Description of Artificial Sequence:  Target Sequence/siNA sense region
agcaccugacccugugccc

SEQ ID NO: 1746 - RNA, 19 nt, Artificial Sequence
  Description of Artificial Sequence:  Target Sequence/siNA sense region
cgccgauuauuccuuggua

SEQ ID NO: 1747 - RNA, 19 nt, Artificial Sequence
  Description of Artificial Sequence:  Target Sequence/siNA sense region
aauaugaguaauacaucaa

SEQ ID NO: 1748 - RNA, 19 nt, Artificial Sequence
  Description of Artificial Sequence:  Target Sequence/siNA sense region
aagaguaguauuaaaagcu

SEQ ID NO: 1749 - RNA, 19 nt, Artificial Sequence
  Description of Artificial Sequence:  Target Sequence/siNA sense region
uaauuaaucauguuuauaa

SEQ ID NO: 1750 - RNA, 19 nt, Artificial Sequence
  Description of Artificial Sequence:  siNA antisense region
ccggccgcugcgcgugggu

SEQ ID NO: 1751 - RNA, 19 nt, Artificial Sequence
  Description of Artificial Sequence:  siNA antisense region
cggcgccccgcugcaucuc

SEQ ID NO: 1752 - RNA, 19 nt, Artificial Sequence
  Description of Artificial Sequence:  siNA antisense region
acagucgcaggcacagcgc

SEQ ID NO: 1753 - RNA, 19 nt, Artificial Sequence
  Description of Artificial Sequence:  siNA antisense region
ggagucccaggcagagcca

SEQ ID NO: 1754 - RNA, 19 nt, Artificial Sequence
  Description of Artificial Sequence:  siNA antisense region
cacucaccaggccguccag

SEQ ID NO: 1755 - RNA, 19 nt, Artificial Sequence
  Description of Artificial Sequence:  siNA antisense region
ggggggucauggaguaguc

SEQ ID NO: 1756 - RNA, 19 nt, Artificial Sequence
  Description of Artificial Sequence:  siNA antisense region
ccgugauguucaaggucgg

SEQ ID NO: 1757 - RNA, 19 nt, Artificial Sequence
  Description of Artificial Sequence:  siNA antisense region
cgaugacgugugacuccuc

SEQ ID NO: 1758 - RNA, 19 nt, Artificial Sequence
  Description of Artificial Sequence:  siNA antisense region
acaggcugucaccgguguc

SEQ ID NO: 1759 - RNA, 19 nt, Artificial Sequence
  Description of Artificial Sequence:  siNA antisense region
guccccugcaggagaugga

SEQ ID NO: 1760 - RNA, 19 nt, Artificial Sequence
  Description of Artificial Sequence:  siNA antisense region
cccacucgagggggugcug

SEQ ID NO: 1761 - RNA, 19 nt, Artificial Sequence
  Description of Artificial Sequence:  siNA antisense region
ccugagcuccuggccaagc

SEQ ID NO: 1762 - RNA, 19 nt, Artificial Sequence
  Description of Artificial Sequence:  siNA antisense region
cuccgguggcuggcgccuc

SEQ ID NO: 1763 - RNA, 19 nt, Artificial Sequence
  Description of Artificial Sequence:  siNA antisense region
uguccucgcuguccuuguc

SEQ ID NO: 1764 - RNA, 19 nt, Artificial Sequence
  Description of Artificial Sequence:  siNA antisense region
agucucgcaccacccccgu

SEQ ID NO: 1765 - RNA, 19 nt, Artificial Sequence
  Description of Artificial Sequence:  siNA antisense region
uggcgucugugcccucgca

SEQ ID NO: 1766 - RNA, 19 nt, Artificial Sequence
  Description of Artificial Sequence:  siNA antisense region
acaccuugcaguagggccu

SEQ ID NO: 1767 - RNA, 19 nt, Artificial Sequence
  Description of Artificial Sequence:  siNA antisense region
guaccucgugcagcagcaa

SEQ ID NO: 1768 - RNA, 19 nt, Artificial Sequence
  Description of Artificial Sequence:  siNA antisense region
ugccugugucguuggcaug

SEQ ID NO: 1769 - RNA, 19 nt, Artificial Sequence
  Description of Artificial Sequence:  siNA antisense region
uguaguagcagacguagcu

SEQ ID NO: 1770 - RNA, 19 nt, Artificial Sequence
  Description of Artificial Sequence:  siNA antisense region
ugcgugccuugauguacuu

SEQ ID NO: 1771 - RNA, 19 nt, Artificial Sequence
  Description of Artificial Sequence:  siNA antisense region
cggccguggugcccucgau

SEQ ID NO: 1772 - RNA, 19 nt, Artificial Sequence
  Description of Artificial Sequence:  siNA antisense region
cgaacacguaggagcuggc

SEQ ID NO: 1773 - RNA, 19 nt, Artificial Sequence
  Description of Artificial Sequence:  siNA antisense region
gcugcucaaagucucucac

SEQ ID NO: 1774 - RNA, 19 nt, Artificial Sequence
  Description of Artificial Sequence:  siNA antisense region
caggcuuguugaugaaugg

SEQ ID NO: 1775 - RNA, 19 nt, Artificial Sequence
  Description of Artificial Sequence:  siNA antisense region
uguugaccaagagcguguc

SEQ ID NO: 1776 - RNA, 19 nt, Artificial Sequence
  Description of Artificial Sequence:  siNA antisense region
cccacauggcguccuuccu

SEQ ID NO: 1777 - RNA, 19 nt, Artificial Sequence
  Description of Artificial Sequence:  siNA antisense region
uggacaccagacagggcac

SEQ ID NO: 1778 - RNA, 19 nt, Artificial Sequence
  Description of Artificial Sequence:  siNA antisense region
ugacauugaggccggggau

SEQ ID NO: 1779 - RNA, 19 nt, Artificial Sequence
  Description of Artificial Sequence:  siNA antisense region
agcuuugcgagcgcagcgu

SEQ ID NO: 1780 - RNA, 19 nt, Artificial Sequence
  Description of Artificial Sequence:  siNA antisense region
cgucuggccacagcaccga

SEQ ID NO: 1781 - RNA, 19 nt, Artificial Sequence
  Description of Artificial Sequence:  siNA antisense region
cccacaccaccuccugccc

SEQ ID NO: 1782 - RNA, 19 nt, Artificial Sequence
  Description of Artificial Sequence:  siNA antisense region
gcaugccccgccggucauc

SEQ ID NO: 1783 - RNA, 19 nt, Artificial Sequence
  Description of Artificial Sequence:  siNA antisense region
gcaguggcguggacacgag

SEQ ID NO: 1784 - RNA, 19 nt, Artificial Sequence
  Description of Artificial Sequence:  siNA antisense region
gguacagggcaucgugcag

SEQ ID NO: 1785 - RNA, 19 nt, Artificial Sequence
  Description of Artificial Sequence:  siNA antisense region
agguggucucgcacugcag

SEQ ID NO: 1786 - RNA, 19 nt, Artificial Sequence
  Description of Artificial Sequence:  siNA antisense region
ggaaguccuggucucccca

SEQ ID NO: 1787 - RNA, 19 nt, Artificial Sequence
  Description of Artificial Sequence:  siNA antisense region
ccaggaagggguuggaaag

SEQ ID NO: 1788 - RNA, 19 nt, Artificial Sequence
  Description of Artificial Sequence:  siNA antisense region
cguugccugugaugugcac

SEQ ID NO: 1789 - RNA, 19 nt, Artificial Sequence
  Description of Artificial Sequence:  siNA antisense region
gcuggaugucauagagcuc

SEQ ID NO: 1790 - RNA, 19 nt, Artificial Sequence
  Description of Artificial Sequence:  siNA antisense region
gcgacuuccugggcaacag

SEQ ID NO: 1791 - RNA, 19 nt, Artificial Sequence
  Description of Artificial Sequence:  siNA antisense region
ccccuaccagcagcuccag

SEQ ID NO: 1792 - RNA, 19 nt, Artificial Sequence
  Description of Artificial Sequence:  siNA antisense region
aguugaggaccagcuucuc

SEQ ID NO: 1793 - RNA, 19 nt, Artificial Sequence
  Description of Artificial Sequence:  siNA antisense region
acucagcccacacggugca

SEQ ID NO: 1794 - RNA, 19 nt, Artificial Sequence
  Description of Artificial Sequence:  siNA antisense region
aggugacaccugaguuaaa

SEQ ID NO: 1795 - RNA, 19 nt, Artificial Sequence
  Description of Artificial Sequence:  siNA antisense region
cuggguagucccagucaaa

SEQ ID NO: 1796 - RNA, 19 nt, Artificial Sequence
  Description of Artificial Sequence:  siNA antisense region
cccgcucugccugcuuccc

SEQ ID NO: 1797 - RNA, 19 nt, Artificial Sequence
  Description of Artificial Sequence:  siNA antisense region
gcucgggcacccacuuacc

SEQ ID NO: 1798 - RNA, 19 nt, Artificial Sequence
  Description of Artificial Sequence:  siNA antisense region
gggucuguugggagcgucg

SEQ ID NO: 1799 - RNA, 19 nt, Artificial Sequence
  Description of Artificial Sequence:  siNA antisense region
ugcuggagaguucugugug

SEQ ID NO: 1800 - RNA, 19 nt, Artificial Sequence
  Description of Artificial Sequence:  siNA antisense region
cguuguggauggucaggau

SEQ ID NO: 1801 - RNA, 19 nt, Artificial Sequence
  Description of Artificial Sequence:  siNA antisense region
ccaggucgugcuggcugac

SEQ ID NO: 1802 - RNA, 19 nt, Artificial Sequence
  Description of Artificial Sequence:  siNA antisense region
ccuugcacacauacgagcc

SEQ ID NO: 1803 - RNA, 19 nt, Artificial Sequence
  Description of Artificial Sequence:  siNA antisense region
gcuggaugccguuguuggc

SEQ ID NO: 1804 - RNA, 19 nt, Artificial Sequence
  Description of Artificial Sequence:  siNA antisense region
cggugcucucccgaaaucg

SEQ ID NO: 1805 - RNA, 19 nt, Artificial Sequence
  Description of Artificial Sequence:  siNA antisense region
uuucaugcacaaugaccuc

SEQ ID NO: 1806 - RNA, 19 nt, Artificial Sequence
  Description of Artificial Sequence:  siNA antisense region
cgacgcugaugaagggauu

SEQ ID NO: 1807 - RNA, 19 nt, Artificial Sequence
  Description of Artificial Sequence:  siNA antisense region
uggguccuuugagccacuc

SEQ ID NO: 1808 - RNA, 19 nt, Artificial Sequence
  Description of Artificial Sequence:  siNA antisense region
cugccguggccuccaggau

SEQ ID NO: 1809 - RNA, 19 nt, Artificial Sequence
  Description of Artificial Sequence:  siNA antisense region
gcuucaccagcucgucucc

SEQ ID NO: 1810 - RNA, 19 nt, Artificial Sequence
  Description of Artificial Sequence:  siNA antisense region
cugccagcuucacgggcag

SEQ ID NO: 1811 - RNA, 19 nt, Artificial Sequence
  Description of Artificial Sequence:  siNA antisense region
acucgggcgggggguacgc

SEQ ID NO: 1812 - RNA, 19 nt, Artificial Sequence
  Description of Artificial Sequence:  siNA antisense region
cauccuuguaccacuggaa

SEQ ID NO: 1813 - RNA, 19 nt, Artificial Sequence
  Description of Artificial Sequence:  siNA antisense region
gcccggacagugccuuucc

SEQ ID NO: 1814 - RNA, 19 nt, Artificial Sequence
  Description of Artificial Sequence:  siNA antisense region
gggcauguggacuguggcg

SEQ ID NO: 1815 - RNA, 19 nt, Artificial Sequence
  Description of Artificial Sequence:  siNA antisense region
ucaccuccuugagcaccag

SEQ ID NO: 1816 - RNA, 19 nt, Artificial Sequence
  Description of Artificial Sequence:  siNA antisense region
ugccugugcuggccucugu

SEQ ID NO: 1817 - RNA, 19 nt, Artificial Sequence
  Description of Artificial Sequence:  siNA antisense region
acagggcgaggguguaggu

SEQ ID NO: 1818 - RNA, 19 nt, Artificial Sequence
  Description of Artificial Sequence:  siNA antisense region
ggccagcagcggaguucca

SEQ ID NO: 1819 - RNA, 19 nt, Artificial Sequence
  Description of Artificial Sequence:  siNA antisense region
ggcugauguugcgccucag

SEQ ID NO: 1820 - RNA, 19 nt, Artificial Sequence
  Description of Artificial Sequence:  siNA antisense region
cauucaccaccagcuccag

SEQ ID NO: 1821 - RNA, 19 nt, Artificial Sequence
  Description of Artificial Sequence:  siNA antisense region
cauguaucugggggggcac

SEQ ID NO: 1822 - RNA, 19 nt, Artificial Sequence
  Description of Artificial Sequence:  siNA antisense region
gggaggaggccuccuucuc

SEQ ID NO: 1823 - RNA, 19 nt, Artificial Sequence
  Description of Artificial Sequence:  siNA antisense region
gacgcgaguagaugcuggg

SEQ ID NO: 1824 - RNA, 19 nt, Artificial Sequence
  Description of Artificial Sequence:  siNA antisense region
ugagggccuggcggcugug

SEQ ID NO: 1825 - RNA, 19 nt, Artificial Sequence
  Description of Artificial Sequence:  siNA antisense region
ccccguaggccgugcaggu

SEQ ID NO: 1826 - RNA, 19 nt, Artificial Sequence
  Description of Artificial Sequence:  siNA antisense region
ugcugagaggcaggggcac

SEQ ID NO: 1827 - RNA, 19 nt, Artificial Sequence
  Description of Artificial Sequence:  siNA antisense region
gccgccagugccacuggau

SEQ ID NO: 1828 - RNA, 19 nt, Artificial Sequence
  Description of Artificial Sequence:  siNA antisense region
ucuugcaggguguccaggg

SEQ ID NO: 1829 - RNA, 19 nt, Artificial Sequence
  Description of Artificial Sequence:  siNA antisense region
gacuacgcugggcaaacau

SEQ ID NO: 1830 - RNA, 19 nt, Artificial Sequence
  Description of Artificial Sequence:  siNA antisense region
gcugcugccgccgccggag

SEQ ID NO: 1831 - RNA, 19 nt, Artificial Sequence
  Description of Artificial Sequence:  siNA antisense region
acuguggcaugaggucuug

SEQ ID NO: 1832 - RNA, 19 nt, Artificial Sequence
  Description of Artificial Sequence:  siNA antisense region
ccgcccuccagucacggca

SEQ ID NO: 1833 - RNA, 19 nt, Artificial Sequence
  Description of Artificial Sequence:  siNA antisense region
cggcauccugcguggucac

SEQ ID NO: 1834 - RNA, 19 nt, Artificial Sequence
  Description of Artificial Sequence:  siNA antisense region
ggcucucgaugggguucac

SEQ ID NO: 1835 - RNA, 19 nt, Artificial Sequence
  Description of Artificial Sequence:  siNA antisense region
acucgguccagguguccag

SEQ ID NO: 1836 - RNA, 19 nt, Artificial Sequence
  Description of Artificial Sequence:  siNA antisense region
uauucuuucccuccacaaa

SEQ ID NO: 1837 - RNA, 19 nt, Artificial Sequence
  Description of Artificial Sequence:  siNA antisense region
ccagcuugcucacagucuu

SEQ ID NO: 1838 - RNA, 19 nt, Artificial Sequence
  Description of Artificial Sequence:  siNA antisense region
cguuggcauucuggaucac

SEQ ID NO: 1839 - RNA, 19 nt, Artificial Sequence
  Description of Artificial Sequence:  siNA antisense region
acuuguacauggcagacac

SEQ ID NO: 1840 - RNA, 19 nt, Artificial Sequence
  Description of Artificial Sequence:  siNA antisense region
ccuuguuggagaccacaca

SEQ ID NO: 1841 - RNA, 19 nt, Artificial Sequence
  Description of Artificial Sequence:  siNA antisense region
gccgcucauccuggcccac

SEQ ID NO: 1842 - RNA, 19 nt, Artificial Sequence
  Description of Artificial Sequence:  siNA antisense region
ucacauagaaguagaugag

SEQ ID NO: 1843 - RNA, 19 nt, Artificial Sequence
  Description of Artificial Sequence:  siNA antisense region
agccgucggggaugguggu

SEQ ID NO: 1844 - RNA, 19 nt, Artificial Sequence
  Description of Artificial Sequence:  siNA antisense region
gcuuggauucgauggugaa

SEQ ID NO: 1845 - RNA, 19 nt, Artificial Sequence
  Description of Artificial Sequence:  siNA antisense region
cuaguagcuccucggaugg

SEQ ID NO: 1846 - RNA, 19 nt, Artificial Sequence
  Description of Artificial Sequence:  siNA antisense region
ggagcaccggcuggcccuc

SEQ ID NO: 1847 - RNA, 19 nt, Artificial Sequence
  Description of Artificial Sequence:  siNA antisense region
ugucggcuuggcagcucag

SEQ ID NO: 1848 - RNA, 19 nt, Artificial Sequence
  Description of Artificial Sequence:  siNA antisense region
gaugcucguacuuguagcu

SEQ ID NO: 1849 - RNA, 19 nt, Artificial Sequence
  Description of Artificial Sequence:  siNA antisense region
ugaggcgguaccagcgcag

SEQ ID NO: 1850 - RNA, 19 nt, Artificial Sequence
  Description of Artificial Sequence:  siNA antisense region
cgugcagcguggacagguu

SEQ ID NO: 1851 - RNA, 19 nt, Artificial Sequence
  Description of Artificial Sequence:  siNA antisense region
gcggguucccgugcgcauc

SEQ ID NO: 1852 - RNA, 19 nt, Artificial Sequence
  Description of Artificial Sequence:  siNA antisense region
ucuugcagucgagcagaag

SEQ ID NO: 1853 - RNA, 19 nt, Artificial Sequence
  Description of Artificial Sequence:  siNA antisense region
uggcgaacagaugcacguu

SEQ ID NO: 1854 - RNA, 19 nt, Artificial Sequence
  Description of Artificial Sequence:  siNA antisense region
ggcuggcggccagaggggu

SEQ ID NO: 1855 - RNA, 19 nt, Artificial Sequence
  Description of Artificial Sequence:  siNA antisense region
caggugccaccuccuccag

SEQ ID NO: 1856 - RNA, 19 nt, Artificial Sequence
  Description of Artificial Sequence:  siNA antisense region
gcguggcguggcgcgcccc

SEQ ID NO: 1857 - RNA, 19 nt, Artificial Sequence
  Description of Artificial Sequence:  siNA antisense region
gggggauacucaggcugag

SEQ ID NO: 1858 - RNA, 19 nt, Artificial Sequence
  Description of Artificial Sequence:  siNA antisense region
cgugcucgggcgcgacgcg

SEQ ID NO: 1859 - RNA, 19 nt, Artificial Sequence
  Description of Artificial Sequence:  siNA antisense region
cgcacacauaguggcccuc

SEQ ID NO: 1860 - RNA, 19 nt, Artificial Sequence
  Description of Artificial Sequence:  siNA antisense region
ugcgccggucuugcacuuc

SEQ ID NO: 1861 - RNA, 19 nt, Artificial Sequence
  Description of Artificial Sequence:  siNA antisense region
ggcagugcuugucauggcu

SEQ ID NO: 1862 - RNA, 19 nt, Artificial Sequence
  Description of Artificial Sequence:  siNA antisense region
ccgacagguacuucuugug

SEQ ID NO: 1863 - RNA, 19 nt, Artificial Sequence
  Description of Artificial Sequence:  siNA antisense region
gggcuuccagggccugcac

SEQ ID NO: 1864 - RNA, 19 nt, Artificial Sequence
  Description of Artificial Sequence:  siNA antisense region
aguucugcgugagccgagg

SEQ ID NO: 1865 - RNA, 19 nt, Artificial Sequence
  Description of Artificial Sequence:  siNA antisense region
ucaccaggaggucggucaa

SEQ ID NO: 1866 - RNA, 19 nt, Artificial Sequence
  Description of Artificial Sequence:  siNA antisense region
ccagcgagucgcucacguu

SEQ ID NO: 1867 - RNA, 19 nt, Artificial Sequence
  Description of Artificial Sequence:  siNA antisense region
ccaccaagcacugcaucuc

SEQ ID NO: 1868 - RNA, 19 nt, Artificial Sequence
  Description of Artificial Sequence:  siNA antisense region
ugggcgcgugcgcuccggc

SEQ ID NO: 1869 - RNA, 19 nt, Artificial Sequence
  Description of Artificial Sequence:  siNA antisense region
cuuuguaccacacgaugcu

SEQ ID NO: 1870 - RNA, 19 nt, Artificial Sequence
  Description of Artificial Sequence:  siNA antisense region
ccuccagcagccucucguc

SEQ ID NO: 1871 - RNA, 19 nt, Artificial Sequence
  Description of Artificial Sequence:  siNA antisense region
agucgacuccagacuuuuc

SEQ ID NO: 1872 - RNA, 19 nt, Artificial Sequence
  Description of Artificial Sequence:  siNA antisense region
ucugguuggaguccgccaa

SEQ ID NO: 1873 - RNA, 19 nt, Artificial Sequence
  Description of Artificial Sequence:  siNA antisense region
cgcgcuggaugcucagcuu

SEQ ID NO: 1874 - RNA, 19 nt, Artificial Sequence
  Description of Artificial Sequence:  siNA antisense region
ccgcauccuccucgcgcac

SEQ ID NO: 1875 - RNA, 19 nt, Artificial Sequence
  Description of Artificial Sequence:  siNA antisense region
cgcugcacagauacggucc

SEQ ID NO: 1876 - RNA, 19 nt, Artificial Sequence
  Description of Artificial Sequence:  siNA antisense region
agcccuugggucugcacac

SEQ ID NO: 1877 - RNA, 19 nt, Artificial Sequence
  Description of Artificial Sequence:  siNA antisense region
uggcggaggaguugacgca

SEQ ID NO: 1878 - RNA, 19 nt, Artificial Sequence
  Description of Artificial Sequence:  siNA antisense region
agccuuccacggccacgcu

SEQ ID NO: 1879 - RNA, 19 nt, Artificial Sequence
  Description of Artificial Sequence:  siNA antisense region
ugcugcccuuauccucgga

SEQ ID NO: 1880 - RNA, 19 nt, Artificial Sequence
  Description of Artificial Sequence:  siNA antisense region
caaggaucacgaucuccau

SEQ ID NO: 1881 - RNA, 19 nt, Artificial Sequence
  Description of Artificial Sequence:  siNA antisense region
cgaugacgccgguaccgac

SEQ ID NO: 1882 - RNA, 19 nt, Artificial Sequence
  Description of Artificial Sequence:  siNA antisense region
ggacccagaagaagacagc

SEQ ID NO: 1883 - RNA, 19 nt, Artificial Sequence
  Description of Artificial Sequence:  siNA antisense region
agaagaugaggaggaggag

SEQ ID NO: 1884 - RNA, 19 nt, Artificial Sequence
  Description of Artificial Sequence:  siNA antisense region
ccggccuccucauguuaca

SEQ ID NO: 1885 - RNA, 19 nt, Artificial Sequence
  Description of Artificial Sequence:  siNA antisense region
ucuugaugucugcgugggc

SEQ ID NO: 1886 - RNA, 19 nt, Artificial Sequence
  Description of Artificial Sequence:  siNA antisense region
ugauggacagguagcccgu

SEQ ID NO: 1887 - RNA, 19 nt, Artificial Sequence
  Description of Artificial Sequence:  siNA antisense region
ccuccccgggguccaugau

SEQ ID NO: 1888 - RNA, 19 nt, Artificial Sequence
  Description of Artificial Sequence:  siNA antisense region
auugcuccuccagaggcac

SEQ ID NO: 1889 - RNA, 19 nt, Artificial Sequence
  Description of Artificial Sequence:  siNA antisense region
cguaggacagguauucgca

SEQ ID NO: 1890 - RNA, 19 nt, Artificial Sequence
  Description of Artificial Sequence:  siNA antisense region
auucccacuggcuggcauc

SEQ ID NO: 1891 - RNA, 19 nt, Artificial Sequence
  Description of Artificial Sequence:  siNA antisense region
gcagccgcucucgggggaa

SEQ ID NO: 1892 - RNA, 19 nt, Artificial Sequence
  Description of Artificial Sequence:  siNA antisense region
cgagcacucuccccaggug

SEQ ID NO: 1893 - RNA, 19 nt, Artificial Sequence
  Description of Artificial Sequence:  siNA antisense region
ucccgaaggcgccguagcc

SEQ ID NO: 1894 - RNA, 19 nt, Artificial Sequence
  Description of Artificial Sequence:  siNA antisense region
cggaggcuuccaccaccuu

SEQ ID NO: 1895 - RNA, 19 nt, Artificial Sequence
  Description of Artificial Sequence:  siNA antisense region
ccuuguggaugccgaaagc

SEQ ID NO: 1896 - RNA, 19 nt, Artificial Sequence
  Description of Artificial Sequence:  siNA antisense region
cggugucacagcugcugcc

SEQ ID NO: 1897 - RNA, 19 nt, Artificial Sequence
  Description of Artificial Sequence:  siNA antisense region
ucagcauuuucacggccac

SEQ ID NO: 1898 - RNA, 19 nt, Artificial Sequence
  Description of Artificial Sequence:  siNA antisense region
uggccguggcgcccucuuu

SEQ ID NO: 1899 - RNA, 19 nt, Artificial Sequence
  Description of Artificial Sequence:  siNA antisense region
ucagcgcgcgcugcucgcu

SEQ ID NO: 1900 - RNA, 19 nt, Artificial Sequence
  Description of Artificial Sequence:  siNA antisense region
ggaucuugagcuccgacau

SEQ ID NO: 1901 - RNA, 19 nt, Artificial Sequence
  Description of Artificial Sequence:  siNA antisense region
gguugccgaugugaaugag

SEQ ID NO: 1902 - RNA, 19 nt, Artificial Sequence
  Description of Artificial Sequence:  siNA antisense region
gguugaccacguugaggug

SEQ ID NO: 1903 - RNA, 19 nt, Artificial Sequence
  Description of Artificial Sequence:  siNA antisense region
uggugcacgccccgaggag

SEQ ID NO: 1904 - RNA, 19 nt, Artificial Sequence
  Description of Artificial Sequence:  siNA antisense region
ugagggggcccugcggcuu

SEQ ID NO: 1905 - RNA, 19 nt, Artificial Sequence
  Description of Artificial Sequence:  siNA antisense region
agaacuccacgaucaccau

SEQ ID NO: 1906 - RNA, 19 nt, Artificial Sequence
  Description of Artificial Sequence:  siNA antisense region
agagguugccguacuugca

SEQ ID NO: 1907 - RNA, 19 nt, Artificial Sequence
  Description of Artificial Sequence:  siNA antisense region
uggcgcgcaggaaguugga

SEQ ID NO: 1908 - RNA, 19 nt, Artificial Sequence
  Description of Artificial Sequence:  siNA antisense region
ggcugaaggcgucccgcuu

SEQ ID NO: 1909 - RNA, 19 nt, Artificial Sequence
  Description of Artificial Sequence:  siNA antisense region
gagacuucuccgcgcaggg

SEQ ID NO: 1910 - RNA, 19 nt, Artificial Sequence
  Description of Artificial Sequence:  siNA antisense region
agcguccgcgcugcucggg

SEQ ID NO: 1911 - RNA, 19 nt, Artificial Sequence
  Description of Artificial Sequence:  siNA antisense region
gcuccaccauggcgcggaa

SEQ ID NO: 1912 - RNA, 19 nt, Artificial Sequence
  Description of Artificial Sequence:  siNA antisense region
uccgauccagccuggcgag

SEQ ID NO: 1913 - RNA, 19 nt, Artificial Sequence
  Description of Artificial Sequence:  siNA antisense region
cgcugcuccccggccgccu

SEQ ID NO: 1914 - RNA, 19 nt, Artificial Sequence
  Description of Artificial Sequence:  siNA antisense region
gcgcgaagaggacccuguc

SEQ ID NO: 1915 - RNA, 19 nt, Artificial Sequence
  Description of Artificial Sequence:  siNA antisense region
ccucggucuucgagaaccg

SEQ ID NO: 1916 - RNA, 19 nt, Artificial Sequence
  Description of Artificial Sequence:  siNA antisense region
aagcccgccucgcuccgcc

SEQ ID NO: 1917 - RNA, 19 nt, Artificial Sequence
  Description of Artificial Sequence:  siNA antisense region
cagcuucuuggucuggaga

SEQ ID NO: 1918 - RNA, 19 nt, Artificial Sequence
  Description of Artificial Sequence:  siNA antisense region
ggcucagccacagguccuc

SEQ ID NO: 1919 - RNA, 19 nt, Artificial Sequence
  Description of Artificial Sequence:  siNA antisense region
gaucuuccauggucagcgg

SEQ ID NO: 1920 - RNA, 19 nt, Artificial Sequence
  Description of Artificial Sequence:  siNA antisense region
ggaagcuguagcagacaag

SEQ ID NO: 1921 - RNA, 19 nt, Artificial Sequence
  Description of Artificial Sequence:  siNA antisense region
ccaucccucuggccaccug

SEQ ID NO: 1922 - RNA, 19 nt, Artificial Sequence
  Description of Artificial Sequence:  siNA antisense region
uucgggaagccaggaacuc

SEQ ID NO: 1923 - RNA, 19 nt, Artificial Sequence
  Description of Artificial Sequence:  siNA antisense region
ggucucuguggaugcacuu

SEQ ID NO: 1924 - RNA, 19 nt, Artificial Sequence
  Description of Artificial Sequence:  siNA antisense region
gaauguuccgagcagccag

SEQ ID NO: 1925 - RNA, 19 nt, Artificial Sequence
  Description of Artificial Sequence:  siNA antisense region
cgucgcuuuccgacagcag

SEQ ID NO: 1926 - RNA, 19 nt, Artificial Sequence
  Description of Artificial Sequence:  siNA antisense region
agucacagaucuucaccac

SEQ ID NO: 1927 - RNA, 19 nt, Artificial Sequence
  Description of Artificial Sequence:  siNA antisense region
ugucccgggcaaggccaaa

SEQ ID NO: 1928 - RNA, 19 nt, Artificial Sequence
  Description of Artificial Sequence:  siNA antisense region
agucggggucuuuguagau

SEQ ID NO: 1929 - RNA, 19 nt, Artificial Sequence
  Description of Artificial Sequence:  siNA antisense region
cacugcccuugcggacgua

SEQ ID NO: 1930 - RNA, 19 nt, Artificial Sequence
  Description of Artificial Sequence:  siNA antisense region
acuucaggggcagccgggc

SEQ ID NO: 1931 - RNA, 19 nt, Artificial Sequence
  Description of Artificial Sequence:  siNA antisense region
ugcuuucaggggccaucca

SEQ ID NO: 1932 - RNA, 19 nt, Artificial Sequence
  Description of Artificial Sequence:  siNA antisense region
uguacaccuugucgaagau

SEQ ID NO: 1933 - RNA, 19 nt, Artificial Sequence
  Description of Artificial Sequence:  siNA antisense region
acacgucacucugcguggu

SEQ ID NO: 1934 - RNA, 19 nt, Artificial Sequence
  Description of Artificial Sequence:  siNA antisense region
gaagcaccccaaaggacca

SEQ ID NO: 1935 - RNA, 19 nt, Artificial Sequence
  Description of Artificial Sequence:  siNA antisense region
gagagaagaucucccagag

SEQ ID NO: 1936 - RNA, 19 nt, Artificial Sequence
  Description of Artificial Sequence:  siNA antisense region
gguacggggaggcccccag

SEQ ID NO: 1937 - RNA, 19 nt, Artificial Sequence
  Description of Artificial Sequence:  siNA antisense region
cauugaucugcaccccagg

SEQ ID NO: 1938 - RNA, 19 nt, Artificial Sequence
  Description of Artificial Sequence:  siNA antisense region
cgcgcuggcagaacuccuc

SEQ ID NO: 1939 - RNA, 19 nt, Artificial Sequence
  Description of Artificial Sequence:  siNA antisense region
uccuugugccgucucucac

SEQ ID NO: 1940 - RNA, 19 nt, Artificial Sequence
  Description of Artificial Sequence:  siNA antisense region
ccagcuccggggcccucau

SEQ ID NO: 1941 - RNA, 19 nt, Artificial Sequence
  Description of Artificial Sequence:  siNA antisense region
ggcguauggcgggaguggc

SEQ ID NO: 1942 - RNA, 19 nt, Artificial Sequence
  Description of Artificial Sequence:  siNA antisense region
agcaguucagcaugaugug

SEQ ID NO: 1943 - RNA, 19 nt, Artificial Sequence
  Description of Artificial Sequence:  siNA antisense region
ccuuggggucuccggacca

SEQ ID NO: 1944 - RNA, 19 nt, Artificial Sequence
  Description of Artificial Sequence:  siNA antisense region
ccgagaaugcaggucucgc

SEQ ID NO: 1945 - RNA, 19 nt, Artificial Sequence
  Description of Artificial Sequence:  siNA antisense region
ccaggaucuccaccagguc

SEQ ID NO: 1946 - RNA, 19 nt, Artificial Sequence
  Description of Artificial Sequence:  siNA antisense region
ugcccuggagcaggucccc

SEQ ID NO: 1947 - RNA, 19 nt, Artificial Sequence
  Description of Artificial Sequence:  siNA antisense region
cuuccucuugcaggccccu

SEQ ID NO: 1948 - RNA, 19 nt, Artificial Sequence
  Description of Artificial Sequence:  siNA antisense region
gggccaugcagaccuccuc

SEQ ID NO: 1949 - RNA, 19 nt, Artificial Sequence
  Description of Artificial Sequence:  siNA antisense region
agcucugagagcugcgcgg

SEQ ID NO: 1950 - RNA, 19 nt, Artificial Sequence
  Description of Artificial Sequence:  siNA antisense region
agaagcugcccucuucuga

SEQ ID NO: 1951 - RNA, 19 nt, Artificial Sequence
  Description of Artificial Sequence:  siNA antisense region
ccaugguggacaccugcga

SEQ ID NO: 1952 - RNA, 19 nt, Artificial Sequence
  Description of Artificial Sequence:  siNA antisense region
ccugggcgauguguagggc

SEQ ID NO: 1953 - RNA, 19 nt, Artificial Sequence
  Description of Artificial Sequence:  siNA antisense region
ggcuguccucagcgucagc

SEQ ID NO: 1954 - RNA, 19 nt, Artificial Sequence
  Description of Artificial Sequence:  siNA antisense region
ggcgcugcaggcuuggcgg

SEQ ID NO: 1955 - RNA, 19 nt, Artificial Sequence
  Description of Artificial Sequence:  siNA antisense region
accuggcggccaggcugug

SEQ ID NO: 1956 - RNA, 19 nt, Artificial Sequence
  Description of Artificial Sequence:  siNA antisense region
aggacacccaguuguaaua

SEQ ID NO: 1957 - RNA, 19 nt, Artificial Sequence
  Description of Artificial Sequence:  siNA antisense region
uggccaggcacccgggaaa

SEQ ID NO: 1958 - RNA, 19 nt, Artificial Sequence
  Description of Artificial Sequence:  siNA antisense region
cacgggucucagccccucu

SEQ ID NO: 1959 - RNA, 19 nt, Artificial Sequence
  Description of Artificial Sequence:  siNA antisense region
ucuucauccuggaggaacc

SEQ ID NO: 1960 - RNA, 19 nt, Artificial Sequence
  Description of Artificial Sequence:  siNA antisense region
uggggaauuccucaaaugu

SEQ ID NO: 1961 - RNA, 19 nt, Artificial Sequence
  Description of Artificial Sequence:  siNA antisense region
uguaggucguuggggucau

SEQ ID NO: 1962 - RNA, 19 nt, Artificial Sequence
  Description of Artificial Sequence:  siNA antisense region
gguuguccacagagccuuu

SEQ ID NO: 1963 - RNA, 19 nt, Artificial Sequence
  Description of Artificial Sequence:  siNA antisense region
ccaucccacugucugucug

SEQ ID NO: 1964 - RNA, 19 nt, Artificial Sequence
  Description of Artificial Sequence:  siNA antisense region
acuccuccgaggccagcac

SEQ ID NO: 1965 - RNA, 19 nt, Artificial Sequence
  Description of Artificial Sequence:  siNA antisense region
ugcucucuaucugcucaaa

SEQ ID NO: 1966 - RNA, 19 nt, Artificial Sequence
  Description of Artificial Sequence:  siNA antisense region
cgcuuucuugucuaugccu

SEQ ID NO: 1967 - RNA, 19 nt, Artificial Sequence
  Description of Artificial Sequence:  siNA antisense region
gcuucagcuaccugaagcc

SEQ ID NO: 1968 - RNA, 19 nt, Artificial Sequence
  Description of Artificial Sequence:  siNA antisense region
gcugccuucucucucucug

SEQ ID NO: 1969 - RNA, 19 nt, Artificial Sequence
  Description of Artificial Sequence:  siNA antisense region
aagaaaaugcugacguaug

SEQ ID NO: 1970 - RNA, 19 nt, Artificial Sequence
  Description of Artificial Sequence:  siNA antisense region
uuucuuauaagugcagaga

SEQ ID NO: 1971 - RNA, 19 nt, Artificial Sequence
  Description of Artificial Sequence:  siNA antisense region
gucuuaaagucuuugaucu

SEQ ID NO: 1972 - RNA, 19 nt, Artificial Sequence
  Description of Artificial Sequence:  siNA antisense region
guagaagaaauagcgaaag

SEQ ID NO: 1973 - RNA, 19 nt, Artificial Sequence
  Description of Artificial Sequence:  siNA antisense region
aguuuguaguagauagcag

SEQ ID NO: 1974 - RNA, 19 nt, Artificial Sequence
  Description of Artificial Sequence:  siNA antisense region
cuccugguuccucuuugaa

SEQ ID NO: 1975 - RNA, 19 nt, Artificial Sequence
  Description of Artificial Sequence:  siNA antisense region
uuucaugcuccucuugucc

SEQ ID NO: 1976 - RNA, 19 nt, Artificial Sequence
  Description of Artificial Sequence:  siNA antisense region
gucacacuccuuguccacu

SEQ ID NO: 1977 - RNA, 19 nt, Artificial Sequence
  Description of Artificial Sequence:  siNA antisense region
cccuguggugcuucagugg

SEQ ID NO: 1978 - RNA, 19 nt, Artificial Sequence
  Description of Artificial Sequence:  siNA antisense region
uccggaggccuaaccccuc

SEQ ID NO: 1979 - RNA, 19 nt, Artificial Sequence
  Description of Artificial Sequence:  siNA antisense region
caggccugcccgcagucau

SEQ ID NO: 1980 - RNA, 19 nt, Artificial Sequence
  Description of Artificial Sequence:  siNA antisense region
gggaggcuggauauuaucc

SEQ ID NO: 1981 - RNA, 19 nt, Artificial Sequence
  Description of Artificial Sequence:  siNA antisense region
gcuccaccagcuucuugug

SEQ ID NO: 1982 - RNA, 19 nt, Artificial Sequence
  Description of Artificial Sequence:  siNA antisense region
ggagucagggaacacucug

SEQ ID NO: 1983 - RNA, 19 nt, Artificial Sequence
  Description of Artificial Sequence:  siNA antisense region
cgucucccuuuccuuggag

SEQ ID NO: 1984 - RNA, 19 nt, Artificial Sequence
  Description of Artificial Sequence:  siNA antisense region
cagcagaccaugaaagggc

SEQ ID NO: 1985 - RNA, 19 nt, Artificial Sequence
  Description of Artificial Sequence:  siNA antisense region
gggaaggcaccuguuacuc

SEQ ID NO: 1986 - RNA, 19 nt, Artificial Sequence
  Description of Artificial Sequence:  siNA antisense region
gcaguaacgccagugucug

SEQ ID NO: 1987 - RNA, 19 nt, Artificial Sequence
  Description of Artificial Sequence:  siNA antisense region
ugagggcucuuuggucaag

SEQ ID NO: 1988 - RNA, 19 nt, Artificial Sequence
  Description of Artificial Sequence:  siNA antisense region
gcuggcauaagggccgcuu

SEQ ID NO: 1989 - RNA, 19 nt, Artificial Sequence
  Description of Artificial Sequence:  siNA antisense region
aggugagcccucugucacg

SEQ ID NO: 1990 - RNA, 19 nt, Artificial Sequence
  Description of Artificial Sequence:  siNA antisense region
agugaccuagaaggcaaga

SEQ ID NO: 1991 - RNA, 19 nt, Artificial Sequence
  Description of Artificial Sequence:  siNA antisense region
ugaagggacauugugagaa

SEQ ID NO: 1992 - RNA, 19 nt, Artificial Sequence
  Description of Artificial Sequence:  siNA antisense region
gggcacagggucaggugcu

SEQ ID NO: 1993 - RNA, 19 nt, Artificial Sequence
  Description of Artificial Sequence:  siNA antisense region
uaccaaggaauaaucggcg

SEQ ID NO: 1994 - RNA, 19 nt, Artificial Sequence
  Description of Artificial Sequence:  siNA antisense region
uugauguauuacucauauu

SEQ ID NO: 1995 - RNA, 19 nt, Artificial Sequence
  Description of Artificial Sequence:  siNA antisense region
agcuuuuaauacuacucuu

SEQ ID NO: 1996 - RNA, 19 nt, Artificial Sequence
  Description of Artificial Sequence:  siNA antisense region
uuauaaacaugauuaauua

SEQ ID NO: 1997 - RNA, 19 nt, Artificial Sequence
  Description of Artificial Sequence:  Target Sequence/siNA sense region
gcggaggcuuggggcagcc

SEQ ID NO: 1998 - RNA, 19 nt, Artificial Sequence
  Description of Artificial Sequence:  Target Sequence/siNA sense region
cggguagcucggaggucgu

SEQ ID NO: 1999 - RNA, 19 nt, Artificial Sequence
  Description of Artificial Sequence:  Target Sequence/siNA sense region
uggcgcugggggcuagcac

SEQ ID NO: 2000 - RNA, 19 nt, Artificial Sequence
  Description of Artificial Sequence:  Target Sequence/siNA sense region
ccagcgcucugucgggagg

SEQ ID NO: 2001 - RNA, 19 nt, Artificial Sequence
  Description of Artificial Sequence:  Target Sequence/siNA sense region
gcgcagcgguuagguggac

SEQ ID NO: 2002 - RNA, 19 nt, Artificial Sequence
  Description of Artificial Sequence:  Target Sequence/siNA sense region
ccggucagcggacucaccg

SEQ ID NO: 2003 - RNA, 19 nt, Artificial Sequence
  Description of Artificial Sequence:  Target Sequence/siNA sense region
ggccagggcgcucggugcu

SEQ ID NO: 2004 - RNA, 19 nt, Artificial Sequence
  Description of Artificial Sequence:  Target Sequence/siNA sense region
uggaauuugauauucauug

SEQ ID NO: 2005 - RNA, 19 nt, Artificial Sequence
  Description of Artificial Sequence:  Target Sequence/siNA sense region
gauccggguuuuaucccuc

SEQ ID NO: 2006 - RNA, 19 nt, Artificial Sequence
  Description of Artificial Sequence:  Target Sequence/siNA sense region
cuucuuuuuucuuaaacau

SEQ ID NO: 2007 - RNA, 19 nt, Artificial Sequence
  Description of Artificial Sequence:  Target Sequence/siNA sense region
uuuuuuuuuaaaacuguau

SEQ ID NO: 2008 - RNA, 19 nt, Artificial Sequence
  Description of Artificial Sequence:  Target Sequence/siNA sense region
uuguuucucguuuuaauuu

SEQ ID NO: 2009 - RNA, 19 nt, Artificial Sequence
  Description of Artificial Sequence:  Target Sequence/siNA sense region
uauuuuugcuugccauucc

SEQ ID NO: 2010 - RNA, 19 nt, Artificial Sequence
  Description of Artificial Sequence:  Target Sequence/siNA sense region
cccacuugaaucgggccga

SEQ ID NO: 2011 - RNA, 19 nt, Artificial Sequence
  Description of Artificial Sequence:  Target Sequence/siNA sense region
acggcuuggggagauugcu

SEQ ID NO: 2012 - RNA, 19 nt, Artificial Sequence
  Description of Artificial Sequence:  Target Sequence/siNA sense region
ucuacuuccccaaaucacu

SEQ ID NO: 2013 - RNA, 19 nt, Artificial Sequence
  Description of Artificial Sequence:  Target Sequence/siNA sense region
uguggauuuuggaaaccag

SEQ ID NO: 2014 - RNA, 19 nt, Artificial Sequence
  Description of Artificial Sequence:  Target Sequence/siNA sense region
gcagaaagaggaaagaggu

SEQ ID NO: 2015 - RNA, 19 nt, Artificial Sequence
  Description of Artificial Sequence:  Target Sequence/siNA sense region
uagcaagagcuccagagag

SEQ ID NO: 2016 - RNA, 19 nt, Artificial Sequence
  Description of Artificial Sequence:  Target Sequence/siNA sense region
gaagucgaggaagagagag

SEQ ID NO: 2017 - RNA, 19 nt, Artificial Sequence
  Description of Artificial Sequence:  Target Sequence/siNA sense region
gacggggucagagagagcg

SEQ ID NO: 2018 - RNA, 19 nt, Artificial Sequence
  Description of Artificial Sequence:  Target Sequence/siNA sense region
gcgcgggcgugcgagcagc

SEQ ID NO: 2019 - RNA, 19 nt, Artificial Sequence
  Description of Artificial Sequence:  Target Sequence/siNA sense region
cgaaagcgacaggggcaaa

SEQ ID NO: 2020 - RNA, 19 nt, Artificial Sequence
  Description of Artificial Sequence:  Target Sequence/siNA sense region
agugagugaccugcuuuug

SEQ ID NO: 2021 - RNA, 19 nt, Artificial Sequence
  Description of Artificial Sequence:  Target Sequence/siNA sense region
gggggugaccgccggagcg

SEQ ID NO: 2022 - RNA, 19 nt, Artificial Sequence
  Description of Artificial Sequence:  Target Sequence/siNA sense region
gcggcgugagcccuccccc

SEQ ID NO: 2023 - RNA, 19 nt, Artificial Sequence
  Description of Artificial Sequence:  Target Sequence/siNA sense region
cuugggaucccgcagcuga

SEQ ID NO: 2024 - RNA, 19 nt, Artificial Sequence
  Description of Artificial Sequence:  Target Sequence/siNA sense region
accagucgcgcugacggac

SEQ ID NO: 2025 - RNA, 19 nt, Artificial Sequence
  Description of Artificial Sequence:  Target Sequence/siNA sense region
cagacagacagacaccgcc

SEQ ID NO: 2026 - RNA, 19 nt, Artificial Sequence
  Description of Artificial Sequence:  Target Sequence/siNA sense region
ccccagccccagcuaccac

SEQ ID NO: 2027 - RNA, 19 nt, Artificial Sequence
  Description of Artificial Sequence:  Target Sequence/siNA sense region
ccuccuccccggccggcgg

SEQ ID NO: 2028 - RNA, 19 nt, Artificial Sequence
  Description of Artificial Sequence:  Target Sequence/siNA sense region
gcggacaguggacgcggcg

SEQ ID NO: 2029 - RNA, 19 nt, Artificial Sequence
  Description of Artificial Sequence:  Target Sequence/siNA sense region
ggcgagccgcgggcagggg

SEQ ID NO: 2030 - RNA, 19 nt, Artificial Sequence
  Description of Artificial Sequence:  Target Sequence/siNA sense region
gccggagcccgcgcccgga

SEQ ID NO: 2031 - RNA, 19 nt, Artificial Sequence
  Description of Artificial Sequence:  Target Sequence/siNA sense region
aggcgggguggaggggguc

SEQ ID NO: 2032 - RNA, 19 nt, Artificial Sequence
  Description of Artificial Sequence:  Target Sequence/siNA sense region
cggggcucgcggcgucgca

SEQ ID NO: 2033 - RNA, 19 nt, Artificial Sequence
  Description of Artificial Sequence:  Target Sequence/siNA sense region
acugaaacuuuucguccaa

SEQ ID NO: 2034 - RNA, 19 nt, Artificial Sequence
  Description of Artificial Sequence:  Target Sequence/siNA sense region
acuucugggcuguucucgc

SEQ ID NO: 2035 - RNA, 19 nt, Artificial Sequence
  Description of Artificial Sequence:  Target Sequence/siNA sense region
cuucggaggagccgugguc

SEQ ID NO: 2036 - RNA, 19 nt, Artificial Sequence
  Description of Artificial Sequence:  Target Sequence/siNA sense region
ccgcgcgggggaagccgag

SEQ ID NO: 2037 - RNA, 19 nt, Artificial Sequence
  Description of Artificial Sequence:  Target Sequence/siNA sense region
gccgagcggagccgcgaga

SEQ ID NO: 2038 - RNA, 19 nt, Artificial Sequence
  Description of Artificial Sequence:  Target Sequence/siNA sense region
aagugcuagcucgggccgg

SEQ ID NO: 2039 - RNA, 19 nt, Artificial Sequence
  Description of Artificial Sequence:  Target Sequence/siNA sense region
ggaggagccgcagccggag

SEQ ID NO: 2040 - RNA, 19 nt, Artificial Sequence
  Description of Artificial Sequence:  Target Sequence/siNA sense region
ggagggggaggaggaagaa

SEQ ID NO: 2041 - RNA, 19 nt, Artificial Sequence
  Description of Artificial Sequence:  Target Sequence/siNA sense region
agagaaggaagaggagagg

SEQ ID NO: 2042 - RNA, 19 nt, Artificial Sequence
  Description of Artificial Sequence:  Target Sequence/siNA sense region
ggggccgcaguggcgacuc

SEQ ID NO: 2043 - RNA, 19 nt, Artificial Sequence
  Description of Artificial Sequence:  Target Sequence/siNA sense region
cggcgcucggaagccgggc

SEQ ID NO: 2044 - RNA, 19 nt, Artificial Sequence
  Description of Artificial Sequence:  Target Sequence/siNA sense region
cucauggacgggugaggcg

SEQ ID NO: 2045 - RNA, 19 nt, Artificial Sequence
  Description of Artificial Sequence:  Target Sequence/siNA sense region
ggcggugugcgcagacagu

SEQ ID NO: 2046 - RNA, 19 nt, Artificial Sequence
  Description of Artificial Sequence:  Target Sequence/siNA sense region
ugcuccagccgcgcgcgcu

SEQ ID NO: 2047 - RNA, 19 nt, Artificial Sequence
  Description of Artificial Sequence:  Target Sequence/siNA sense region
uccccaggcccuggcccgg

SEQ ID NO: 2048 - RNA, 19 nt, Artificial Sequence
  Description of Artificial Sequence:  Target Sequence/siNA sense region
ggccucgggccggggagga

SEQ ID NO: 2049 - RNA, 19 nt, Artificial Sequence
  Description of Artificial Sequence:  Target Sequence/siNA sense region
aagaguagcucgccgaggc

SEQ ID NO: 2050 - RNA, 19 nt, Artificial Sequence
  Description of Artificial Sequence:  Target Sequence/siNA sense region
cgccgaggagagcgggccg

SEQ ID NO: 2051 - RNA, 19 nt, Artificial Sequence
  Description of Artificial Sequence:  Target Sequence/siNA sense region
gccccacagcccgagccgg

SEQ ID NO: 2052 - RNA, 19 nt, Artificial Sequence
  Description of Artificial Sequence:  Target Sequence/siNA sense region
gagagggagcgcgagccgc

SEQ ID NO: 2053 - RNA, 19 nt, Artificial Sequence
  Description of Artificial Sequence:  Target Sequence/siNA sense region
cgccggccccggucgggcc

SEQ ID NO: 2054 - RNA, 19 nt, Artificial Sequence
  Description of Artificial Sequence:  Target Sequence/siNA sense region
cuccgaaaccaugaacuuu

SEQ ID NO: 2055 - RNA, 19 nt, Artificial Sequence
  Description of Artificial Sequence:  Target Sequence/siNA sense region
ucugcugucuugggugcau

SEQ ID NO: 2056 - RNA, 19 nt, Artificial Sequence
  Description of Artificial Sequence:  Target Sequence/siNA sense region
uuggagccuugccuugcug

SEQ ID NO: 2057 - RNA, 19 nt, Artificial Sequence
  Description of Artificial Sequence:  Target Sequence/siNA sense region
gcucuaccuccaccaugcc

SEQ ID NO: 2058 - RNA, 19 nt, Artificial Sequence
  Description of Artificial Sequence:  Target Sequence/siNA sense region
caaguggucccaggcugca

SEQ ID NO: 2059 - RNA, 19 nt, Artificial Sequence
  Description of Artificial Sequence:  Target Sequence/siNA sense region
acccauggcagaaggagga

SEQ ID NO: 2060 - RNA, 19 nt, Artificial Sequence
  Description of Artificial Sequence:  Target Sequence/siNA sense region
agggcagaaucaucacgaa

SEQ ID NO: 2061 - RNA, 19 nt, Artificial Sequence
  Description of Artificial Sequence:  Target Sequence/siNA sense region
aguggugaaguucauggau

SEQ ID NO: 2062 - RNA, 19 nt, Artificial Sequence
  Description of Artificial Sequence:  Target Sequence/siNA sense region
ugucuaucagcgcagcuac

SEQ ID NO: 2063 - RNA, 19 nt, Artificial Sequence
  Description of Artificial Sequence:  Target Sequence/siNA sense region
cugccauccaaucgagacc

SEQ ID NO: 2064 - RNA, 19 nt, Artificial Sequence
  Description of Artificial Sequence:  Target Sequence/siNA sense region
ccugguggacaucuuccag

SEQ ID NO: 2065 - RNA, 19 nt, Artificial Sequence
  Description of Artificial Sequence:  Target Sequence/siNA sense region
ggaguacccugaugagauc

SEQ ID NO: 2066 - RNA, 19 nt, Artificial Sequence
  Description of Artificial Sequence:  Target Sequence/siNA sense region
cgaguacaucuucaagcca

SEQ ID NO: 2067 - RNA, 19 nt, Artificial Sequence
  Description of Artificial Sequence:  Target Sequence/siNA sense region
auccugugugccccugaug

SEQ ID NO: 2068 - RNA, 19 nt, Artificial Sequence
  Description of Artificial Sequence:  Target Sequence/siNA sense region
gcgaugcgggggcugcugc

SEQ ID NO: 2069 - RNA, 19 nt, Artificial Sequence
  Description of Artificial Sequence:  Target Sequence/siNA sense region
caaugacgagggccuggag

SEQ ID NO: 2070 - RNA, 19 nt, Artificial Sequence
  Description of Artificial Sequence:  Target Sequence/siNA sense region
gugugugcccacugaggag

SEQ ID NO: 2071 - RNA, 19 nt, Artificial Sequence
  Description of Artificial Sequence:  Target Sequence/siNA sense region
guccaacaucaccaugcag

SEQ ID NO: 2072 - RNA, 19 nt, Artificial Sequence
  Description of Artificial Sequence:  Target Sequence/siNA sense region
gauuaugcggaucaaaccu

SEQ ID NO: 2073 - RNA, 19 nt, Artificial Sequence
  Description of Artificial Sequence:  Target Sequence/siNA sense region
ucaccaaggccagcacaua

SEQ ID NO: 2074 - RNA, 19 nt, Artificial Sequence
  Description of Artificial Sequence:  Target Sequence/siNA sense region
aggagagaugagcuuccua

SEQ ID NO: 2075 - RNA, 19 nt, Artificial Sequence
  Description of Artificial Sequence:  Target Sequence/siNA sense region
acagcacaacaaaugugaa

SEQ ID NO: 2076 - RNA, 19 nt, Artificial Sequence
  Description of Artificial Sequence:  Target Sequence/siNA sense region
augcagaccaaagaaagau

SEQ ID NO: 2077 - RNA, 19 nt, Artificial Sequence
  Description of Artificial Sequence:  Target Sequence/siNA sense region
uagagcaagacaagaaaaa

SEQ ID NO: 2078 - RNA, 19 nt, Artificial Sequence
  Description of Artificial Sequence:  Target Sequence/siNA sense region
aaaaucaguucgaggaaag

SEQ ID NO: 2079 - RNA, 19 nt, Artificial Sequence
  Description of Artificial Sequence:  Target Sequence/siNA sense region
gggaaaggggcaaaaacga

SEQ ID NO: 2080 - RNA, 19 nt, Artificial Sequence
  Description of Artificial Sequence:  Target Sequence/siNA sense region
aaagcgcaagaaaucccgg

SEQ ID NO: 2081 - RNA, 19 nt, Artificial Sequence
  Description of Artificial Sequence:  Target Sequence/siNA sense region
guauaaguccuggagcguu

SEQ ID NO: 2082 - RNA, 19 nt, Artificial Sequence
  Description of Artificial Sequence:  Target Sequence/siNA sense region
ucccugugggccuugcuca

SEQ ID NO: 2083 - RNA, 19 nt, Artificial Sequence
  Description of Artificial Sequence:  Target Sequence/siNA sense region
agagcggagaaagcauuug

SEQ ID NO: 2084 - RNA, 19 nt, Artificial Sequence
  Description of Artificial Sequence:  Target Sequence/siNA sense region
guuuguacaagauccgcag

SEQ ID NO: 2085 - RNA, 19 nt, Artificial Sequence
  Description of Artificial Sequence:  Target Sequence/siNA sense region
gacguguaaauguuccugc

SEQ ID NO: 2086 - RNA, 19 nt, Artificial Sequence
  Description of Artificial Sequence:  Target Sequence/siNA sense region
caaaaacacagacucgcgu

SEQ ID NO: 2087 - RNA, 19 nt, Artificial Sequence
  Description of Artificial Sequence:  Target Sequence/siNA sense region
uugcaaggcgaggcagcuu

SEQ ID NO: 2088 - RNA, 19 nt, Artificial Sequence
  Description of Artificial Sequence:  Target Sequence/siNA sense region
ugaguuaaacgaacguacu

SEQ ID NO: 2089 - RNA, 19 nt, Artificial Sequence
  Description of Artificial Sequence:  Target Sequence/siNA sense region
uugcagaugugacaagccg

SEQ ID NO: 2090 - RNA, 19 nt, Artificial Sequence
  Description of Artificial Sequence:  Target Sequence/siNA sense region
gaggcggugagccgggcag

SEQ ID NO: 2091 - RNA, 19 nt, Artificial Sequence
  Description of Artificial Sequence:  Target Sequence/siNA sense region
ggaggaaggagccucccuc

SEQ ID NO: 2092 - RNA, 19 nt, Artificial Sequence
  Description of Artificial Sequence:  Target Sequence/siNA sense region
gagccucccucaggguuuc

SEQ ID NO: 2093 - RNA, 19 nt, Artificial Sequence
  Description of Artificial Sequence:  siNA antisense region
ggcugccccaagccuccgc

SEQ ID NO: 2094 - RNA, 19 nt, Artificial Sequence
  Description of Artificial Sequence:  siNA antisense region
acgaccuccgagcuacccg

SEQ ID NO: 2095 - RNA, 19 nt, Artificial Sequence
  Description of Artificial Sequence:  siNA antisense region
gugcuagcccccagcgcca

SEQ ID NO: 2096 - RNA, 19 nt, Artificial Sequence
  Description of Artificial Sequence:  siNA antisense region
ccucccgacagagcgcugg

SEQ ID NO: 2097 - RNA, 19 nt, Artificial Sequence
  Description of Artificial Sequence:  siNA antisense region
guccaccuaaccgcugcgc

SEQ ID NO: 2098 - RNA, 19 nt, Artificial Sequence
  Description of Artificial Sequence:  siNA antisense region
cggugaguccgcugaccgg

SEQ ID NO: 2099 - RNA, 19 nt, Artificial Sequence
  Description of Artificial Sequence:  siNA antisense region
agcaccgagcgcccuggcc

SEQ ID NO: 2100 - RNA, 19 nt, Artificial Sequence
  Description of Artificial Sequence:  siNA antisense region
caaugaauaucaaauucca

SEQ ID NO: 2101 - RNA, 19 nt, Artificial Sequence
  Description of Artificial Sequence:  siNA antisense region
gagggauaaaacccggauc

SEQ ID NO: 2102 - RNA, 19 nt, Artificial Sequence
  Description of Artificial Sequence:  siNA antisense region
auguuuaagaaaaaagaag

SEQ ID NO: 2103 - RNA, 19 nt, Artificial Sequence
  Description of Artificial Sequence:  siNA antisense region
auacaguuuuaaaaaaaaa

SEQ ID NO: 2104 - RNA, 19 nt, Artificial Sequence
  Description of Artificial Sequence:  siNA antisense region
aaauuaaaacgagaaacaa

SEQ ID NO: 2105 - RNA, 19 nt, Artificial Sequence
  Description of Artificial Sequence:  siNA antisense region
ggaauggcaagcaaaaaua

SEQ ID NO: 2106 - RNA, 19 nt, Artificial Sequence
  Description of Artificial Sequence:  siNA antisense region
ucggcccgauucaaguggg

SEQ ID NO: 2107 - RNA, 19 nt, Artificial Sequence
  Description of Artificial Sequence:  siNA antisense region
agcaaucuccccaagccgu

SEQ ID NO: 2108 - RNA, 19 nt, Artificial Sequence
  Description of Artificial Sequence:  siNA antisense region
agugauuuggggaaguaga

SEQ ID NO: 2109 - RNA, 19 nt, Artificial Sequence
  Description of Artificial Sequence:  siNA antisense region
cugguuuccaaaauccaca

SEQ ID NO: 2110 - RNA, 19 nt, Artificial Sequence
  Description of Artificial Sequence:  siNA antisense region
accucuuuccucuuucugc

SEQ ID NO: 2111 - RNA, 19 nt, Artificial Sequence
  Description of Artificial Sequence:  siNA antisense region
cucucuggagcucuugcua

SEQ ID NO: 2112 - RNA, 19 nt, Artificial Sequence
  Description of Artificial Sequence:  siNA antisense region
cucucucuuccucgacuuc

SEQ ID NO: 2113 - RNA, 19 nt, Artificial Sequence
  Description of Artificial Sequence:  siNA antisense region
cgcucucucugaccccguc

SEQ ID NO: 2114 - RNA, 19 nt, Artificial Sequence
  Description of Artificial Sequence:  siNA antisense region
gcugcucgcacgcccgcgc

SEQ ID NO: 2115 - RNA, 19 nt, Artificial Sequence
  Description of Artificial Sequence:  siNA antisense region
uuugccccugucgcuuucg

SEQ ID NO: 2116 - RNA, 19 nt, Artificial Sequence
  Description of Artificial Sequence:  siNA antisense region
caaaagcaggucacucacu

SEQ ID NO: 2117 - RNA, 19 nt, Artificial Sequence
  Description of Artificial Sequence:  siNA antisense region
cgcuccggcggucaccccc

SEQ ID NO: 2118 - RNA, 19 nt, Artificial Sequence
  Description of Artificial Sequence:  siNA antisense region
gggggagggcucacgccgc

SEQ ID NO: 2119 - RNA, 19 nt, Artificial Sequence
  Description of Artificial Sequence:  siNA antisense region
ucagcugcgggaucccaag

SEQ ID NO: 2120 - RNA, 19 nt, Artificial Sequence
  Description of Artificial Sequence:  siNA antisense region
guccgucagcgcgacuggu

SEQ ID NO: 2121 - RNA, 19 nt, Artificial Sequence
  Description of Artificial Sequence:  siNA antisense region
ggcggugucugucugucug

SEQ ID NO: 2122 - RNA, 19 nt, Artificial Sequence
  Description of Artificial Sequence:  siNA antisense region
gugguagcuggggcugggg

SEQ ID NO: 2123 - RNA, 19 nt, Artificial Sequence
  Description of Artificial Sequence:  siNA antisense region
ccgccggccggggaggagg

SEQ ID NO: 2124 - RNA, 19 nt, Artificial Sequence
  Description of Artificial Sequence:  siNA antisense region
cgccgcguccacuguccgc

SEQ ID NO: 2125 - RNA, 19 nt, Artificial Sequence
  Description of Artificial Sequence:  siNA antisense region
ccccugcccgcggcucgcc

SEQ ID NO: 2126 - RNA, 19 nt, Artificial Sequence
  Description of Artificial Sequence:  siNA antisense region
uccgggcgcgggcuccggc

SEQ ID NO: 2127 - RNA, 19 nt, Artificial Sequence
  Description of Artificial Sequence:  siNA antisense region
gacccccuccaccccgccu

SEQ ID NO: 2128 - RNA, 19 nt, Artificial Sequence
  Description of Artificial Sequence:  siNA antisense region
ugcgacgccgcgagccccg

SEQ ID NO: 2129 - RNA, 19 nt, Artificial Sequence
  Description of Artificial Sequence:  siNA antisense region
uuggacgaaaaguuucagu

SEQ ID NO: 2130 - RNA, 19 nt, Artificial Sequence
  Description of Artificial Sequence:  siNA antisense region
gcgagaacagcccagaagu

SEQ ID NO: 2131 - RNA, 19 nt, Artificial Sequence
  Description of Artificial Sequence:  siNA antisense region
gaccacggcuccuccgaag

SEQ ID NO: 2132 - RNA, 19 nt, Artificial Sequence
  Description of Artificial Sequence:  siNA antisense region
cucggcuucccccgcgcgg

SEQ ID NO: 2133 - RNA, 19 nt, Artificial Sequence
  Description of Artificial Sequence:  siNA antisense region
ucucgcggcuccgcucggc

SEQ ID NO: 2134 - RNA, 19 nt, Artificial Sequence
  Description of Artificial Sequence:  siNA antisense region
ccggcccgagcuagcacuu

SEQ ID NO: 2135 - RNA, 19 nt, Artificial Sequence
  Description of Artificial Sequence:  siNA antisense region
cuccggcugcggcuccucc

SEQ ID NO: 2136 - RNA, 19 nt, Artificial Sequence
  Description of Artificial Sequence:  siNA antisense region
uucuuccuccucccccucc

SEQ ID NO: 2137 - RNA, 19 nt, Artificial Sequence
  Description of Artificial Sequence:  siNA antisense region
ccucuccucuuccuucucu

SEQ ID NO: 2138 - RNA, 19 nt, Artificial Sequence
  Description of Artificial Sequence:  siNA antisense region
gagucgccacugcggcccc

SEQ ID NO: 2139 - RNA, 19 nt, Artificial Sequence
  Description of Artificial Sequence:  siNA antisense region
gcccggcuuccgagcgccg

SEQ ID NO: 2140 - RNA, 19 nt, Artificial Sequence
  Description of Artificial Sequence:  siNA antisense region
cgccucacccguccaugag

SEQ ID NO: 2141 - RNA, 19 nt, Artificial Sequence
  Description of Artificial Sequence:  siNA antisense region
acugucugcgcacaccgcc

SEQ ID NO: 2142 - RNA, 19 nt, Artificial Sequence
  Description of Artificial Sequence:  siNA antisense region
agcgcgcgcggcuggagca

SEQ ID NO: 2143 - RNA, 19 nt, Artificial Sequence
  Description of Artificial Sequence:  siNA antisense region
ccgggccagggccugggga

SEQ ID NO: 2144 - RNA, 19 nt, Artificial Sequence
  Description of Artificial Sequence:  siNA antisense region
uccuccccggcccgaggcc

SEQ ID NO: 2145 - RNA, 19 nt, Artificial Sequence
  Description of Artificial Sequence:  siNA antisense region
gccucggcgagcuacucuu

SEQ ID NO: 2146 - RNA, 19 nt, Artificial Sequence
  Description of Artificial Sequence:  siNA antisense region
cggcccgcucuccucggcg

SEQ ID NO: 2147 - RNA, 19 nt, Artificial Sequence
  Description of Artificial Sequence:  siNA antisense region
ccggcucgggcuguggggc

SEQ ID NO: 2148 - RNA, 19 nt, Artificial Sequence
  Description of Artificial Sequence:  siNA antisense region
gcggcucgcgcucccucuc

SEQ ID NO: 2149 - RNA, 19 nt, Artificial Sequence
  Description of Artificial Sequence:  siNA antisense region
ggcccgaccggggccggcg

SEQ ID NO: 2150 - RNA, 19 nt, Artificial Sequence
  Description of Artificial Sequence:  siNA antisense region
aaaguucaugguuucggag

SEQ ID NO: 2151 - RNA, 19 nt, Artificial Sequence
  Description of Artificial Sequence:  siNA antisense region
augcacccaagacagcaga

SEQ ID NO: 2152 - RNA, 19 nt, Artificial Sequence
  Description of Artificial Sequence:  siNA antisense region
cagcaaggcaaggcuccaa

SEQ ID NO: 2153 - RNA, 19 nt, Artificial Sequence
  Description of Artificial Sequence:  siNA antisense region
ggcaugguggagguagagc

SEQ ID NO: 2154 - RNA, 19 nt, Artificial Sequence
  Description of Artificial Sequence:  siNA antisense region
ugcagccugggaccacuug

SEQ ID NO: 2155 - RNA, 19 nt, Artificial Sequence
  Description of Artificial Sequence:  siNA antisense region
uccuccuucugccaugggu

SEQ ID NO: 2156 - RNA, 19 nt, Artificial Sequence
  Description of Artificial Sequence:  siNA antisense region
uucgugaugauucugcccu

SEQ ID NO: 2157 - RNA, 19 nt, Artificial Sequence
  Description of Artificial Sequence:  siNA antisense region
auccaugaacuucaccacu

SEQ ID NO: 2158 - RNA, 19 nt, Artificial Sequence
  Description of Artificial Sequence:  siNA antisense region
guagcugcgcugauagaca

SEQ ID NO: 2159 - RNA, 19 nt, Artificial Sequence
  Description of Artificial Sequence:  siNA antisense region
ggucucgauuggauggcag

SEQ ID NO: 2160 - RNA, 19 nt, Artificial Sequence
  Description of Artificial Sequence:  siNA antisense region
cuggaagauguccaccagg

SEQ ID NO: 2161 - RNA, 19 nt, Artificial Sequence
  Description of Artificial Sequence:  siNA antisense region
gaucucaucaggguacucc

SEQ ID NO: 2162 - RNA, 19 nt, Artificial Sequence
  Description of Artificial Sequence:  siNA antisense region
uggcuugaagauguacucg

SEQ ID NO: 2163 - RNA, 19 nt, Artificial Sequence
  Description of Artificial Sequence:  siNA antisense region
caucaggggcacacaggau

SEQ ID NO: 2164 - RNA, 19 nt, Artificial Sequence
  Description of Artificial Sequence:  siNA antisense region
gcagcagcccccgcaucgc

SEQ ID NO: 2165 - RNA, 19 nt, Artificial Sequence
  Description of Artificial Sequence:  siNA antisense region
cuccaggcccucgucauug

SEQ ID NO: 2166 - RNA, 19 nt, Artificial Sequence
  Description of Artificial Sequence:  siNA antisense region
cuccucagugggcacacac

SEQ ID NO: 2167 - RNA, 19 nt, Artificial Sequence
  Description of Artificial Sequence:  siNA antisense region
cugcauggugauguuggac

SEQ ID NO: 2168 - RNA, 19 nt, Artificial Sequence
  Description of Artificial Sequence:  siNA antisense region
agguuugauccgcauaauc

SEQ ID NO: 2169 - RNA, 19 nt, Artificial Sequence
  Description of Artificial Sequence:  siNA antisense region
uaugugcuggccuugguga

SEQ ID NO: 2170 - RNA, 19 nt, Artificial Sequence
  Description of Artificial Sequence:  siNA antisense region
uaggaagcucaucucuccu

SEQ ID NO: 2171 - RNA, 19 nt, Artificial Sequence
  Description of Artificial Sequence:  siNA antisense region
uucacauuuguugugcugu

SEQ ID NO: 2172 - RNA, 19 nt, Artificial Sequence
  Description of Artificial Sequence:  siNA antisense region
aucuuucuuuggucugcau

SEQ ID NO: 2173 - RNA, 19 nt, Artificial Sequence
  Description of Artificial Sequence:  siNA antisense region
uuuuucuugucuugcucua

SEQ ID NO: 2174 - RNA, 19 nt, Artificial Sequence
  Description of Artificial Sequence:  siNA antisense region
cuuuccucgaacugauuuu

SEQ ID NO: 2175 - RNA, 19 nt, Artificial Sequence
  Description of Artificial Sequence:  siNA antisense region
ucguuuuugccccuuuccc

SEQ ID NO: 2176 - RNA, 19 nt, Artificial Sequence
  Description of Artificial Sequence:  siNA antisense region
ccgggauuucuugcgcuuu

SEQ ID NO: 2177 - RNA, 19 nt, Artificial Sequence
  Description of Artificial Sequence:  siNA antisense region
aacgcuccaggacuuauac

SEQ ID NO: 2178 - RNA, 19 nt, Artificial Sequence
  Description of Artificial Sequence:  siNA antisense region
ugagcaaggcccacaggga

SEQ ID NO: 2179 - RNA, 19 nt, Artificial Sequence
  Description of Artificial Sequence:  siNA antisense region
caaaugcuuucuccgcucu

SEQ ID NO: 2180 - RNA, 19 nt, Artificial Sequence
  Description of Artificial Sequence:  siNA antisense region
cugcggaucuuguacaaac

SEQ ID NO: 2181 - RNA, 19 nt, Artificial Sequence
  Description of Artificial Sequence:  siNA antisense region
gcaggaacauuuacacguc

SEQ ID NO: 2182 - RNA, 19 nt, Artificial Sequence
  Description of Artificial Sequence:  siNA antisense region
acgcgagucuguguuuuug

SEQ ID NO: 2183 - RNA, 19 nt, Artificial Sequence
  Description of Artificial Sequence:  siNA antisense region
aagcugccucgccuugcaa

SEQ ID NO: 2184 - RNA, 19 nt, Artificial Sequence
  Description of Artificial Sequence:  siNA antisense region
aguacguucguuuaacuca

SEQ ID NO: 2185 - RNA, 19 nt, Artificial Sequence
  Description of Artificial Sequence:  siNA antisense region
cggcuugucacaucugcaa

SEQ ID NO: 2186 - RNA, 19 nt, Artificial Sequence
  Description of Artificial Sequence:  siNA antisense region
cugcccggcucaccgccuc

SEQ ID NO: 2187 - RNA, 19 nt, Artificial Sequence
  Description of Artificial Sequence:  siNA antisense region
gagggaggcuccuuccucc

SEQ ID NO: 2188 - RNA, 19 nt, Artificial Sequence
  Description of Artificial Sequence:  siNA antisense region
gaaacccugagggaggcuc

SEQ ID NO: 2189 - RNA, 23 nt, Artificial Sequence
  Description of Artificial Sequence:  siNA sense region
aucaugcuggacugcuggcacag

SEQ ID NO: 2190 - RNA, 23 nt, Artificial Sequence
  Description of Artificial Sequence:  siNA sense region
accaugcuggacugcuggcacgg

SEQ ID NO: 2191 - RNA, 23 nt, Artificial Sequence
  Description of Artificial Sequence:  siNA sense region
aucauguuggauugcuggcacaa

SEQ ID NO: 2192 - RNA, 23 nt, Artificial Sequence
  Description of Artificial Sequence:  siNA sense region
accaugcuggacugcuggcauga

SEQ ID NO: 2193 - RNA, 23 nt, Artificial Sequence
  Description of Artificial Sequence:  siNA sense region
aucaugcuggauugcuggcacaa

SEQ ID NO: 2194 - RNA, 23 nt, Artificial Sequence
  Description of Artificial Sequence:  siNA sense region
accaugcuggauugcuggcauga

SEQ ID NO: 2195 - RNA, 23 nt, Artificial Sequence
  Description of Artificial Sequence:  siNA sense region
ucaugcuggacugcuggcacaga

SEQ ID NO: 2196 - RNA, 23 nt, Artificial Sequence
  Description of Artificial Sequence:  siNA sense region
ccaugcuggacugcuggcacggg

SEQ ID NO: 2197 - RNA, 23 nt, Artificial Sequence
  Description of Artificial Sequence:  siNA sense region
ucauguuggauugcuggcacaaa

SEQ ID NO: 2198 - RNA, 23 nt, Artificial Sequence
  Description of Artificial Sequence:  siNA sense region
ccaugcuggacugcuggcaugag

SEQ ID NO: 2199 - RNA, 23 nt, Artificial Sequence
  Description of Artificial Sequence:  siNA sense region
ucaugcuggauugcuggcacaaa

SEQ ID NO: 2200 - RNA, 23 nt, Artificial Sequence
  Description of Artificial Sequence:  siNA sense region
ccaugcuggauugcuggcaugag

SEQ ID NO: 2201 - RNA, 23 nt, Artificial Sequence
  Description of Artificial Sequence:  siNA sense region
caugcuggacugcuggcacagag

SEQ ID NO: 2202 - RNA, 23 nt, Artificial Sequence
  Description of Artificial Sequence:  siNA sense region
caugcuggacugcuggcacgggg

SEQ ID NO: 2203 - RNA, 23 nt, Artificial Sequence
  Description of Artificial Sequence:  siNA sense region
cauguuggauugcuggcacaaag

SEQ ID NO: 2204 - RNA, 23 nt, Artificial Sequence
  Description of Artificial Sequence:  siNA sense region
caugcuggacugcuggcaugagg

SEQ ID NO: 2205 - RNA, 23 nt, Artificial Sequence
  Description of Artificial Sequence:  siNA sense region
caugcuggauugcuggcacaaag

SEQ ID NO: 2206 - RNA, 23 nt, Artificial Sequence
  Description of Artificial Sequence:  siNA sense region
caugcuggauugcuggcaugagg

SEQ ID NO: 2207 - RNA, 23 nt, Artificial Sequence
  Description of Artificial Sequence:  siNA sense region
ugccuuaugaugccagcaaaugg

SEQ ID NO: 2208 - RNA, 23 nt, Artificial Sequence
  Description of Artificial Sequence:  siNA sense region
ucccuuaugaugccagcaagugg

SEQ ID NO: 2209 - RNA, 23 nt, Artificial Sequence
  Description of Artificial Sequence:  siNA sense region
ugcccuaugaugccagcaagugg

SEQ ID NO: 2210 - RNA, 23 nt, Artificial Sequence
  Description of Artificial Sequence:  siNA sense region
ugccuuaugaugccagcaagugg

SEQ ID NO: 2211 - RNA, 23 nt, Artificial Sequence
  Description of Artificial Sequence:  siNA sense region
gccuuaugaugccagcaaauggg

SEQ ID NO: 2212 - RNA, 23 nt, Artificial Sequence
  Description of Artificial Sequence:  siNA sense region
cccuuaugaugccagcaaguggg

SEQ ID NO: 2213 - RNA, 23 nt, Artificial Sequence
  Description of Artificial Sequence:  siNA sense region
gcccuaugaugccagcaaguggg

SEQ ID NO: 2214 - RNA, 23 nt, Artificial Sequence
  Description of Artificial Sequence:  siNA sense region
gccuuaugaugccagcaaguggg

SEQ ID NO: 2215 - RNA, 23 nt, Artificial Sequence
  Description of Artificial Sequence:  siNA sense region
ccuuaugaugccagcaaauggga

SEQ ID NO: 2216 - RNA, 23 nt, Artificial Sequence
  Description of Artificial Sequence:  siNA sense region
ccuuaugaugccagcaaguggga

SEQ ID NO: 2217 - RNA, 23 nt, Artificial Sequence
  Description of Artificial Sequence:  siNA sense region
cccuaugaugccagcaaguggga

SEQ ID NO: 2218 - RNA, 23 nt, Artificial Sequence
  Description of Artificial Sequence:  siNA sense region
cuuaugaugccagcaaaugggaa

SEQ ID NO: 2219 - RNA, 23 nt, Artificial Sequence
  Description of Artificial Sequence:  siNA sense region
cuuaugaugccagcaagugggag

SEQ ID NO: 2220 - RNA, 23 nt, Artificial Sequence
  Description of Artificial Sequence:  siNA sense region
ccuaugaugccagcaagugggag

SEQ ID NO: 2221 - RNA, 23 nt, Artificial Sequence
  Description of Artificial Sequence:  siNA sense region
cuuaugaugccagcaagugggaa

SEQ ID NO: 2222 - RNA, 23 nt, Artificial Sequence
  Description of Artificial Sequence:  siNA sense region
uuaugaugccagcaaaugggaau

SEQ ID NO: 2223 - RNA, 23 nt, Artificial Sequence
  Description of Artificial Sequence:  siNA sense region
uuaugaugccagcaagugggagu

SEQ ID NO: 2224 - RNA, 23 nt, Artificial Sequence
  Description of Artificial Sequence:  siNA sense region
cuaugaugccagcaagugggagu

SEQ ID NO: 2225 - RNA, 23 nt, Artificial Sequence
  Description of Artificial Sequence:  siNA sense region
uuaugaugccagcaagugggaau

SEQ ID NO: 2226 - RNA, 23 nt, Artificial Sequence
  Description of Artificial Sequence:  siNA sense region
accagaccaugcuggacugcugg

SEQ ID NO: 2227 - RNA, 23 nt, Artificial Sequence
  Description of Artificial Sequence:  siNA sense region
aucagaucaugcuggacugcugg

SEQ ID NO: 2228 - RNA, 23 nt, Artificial Sequence
  Description of Artificial Sequence:  siNA sense region
accaaaucauguuggauugcugg

SEQ ID NO: 2229 - RNA, 23 nt, Artificial Sequence
  Description of Artificial Sequence:  siNA sense region
accaaaucaugcuggauugcugg

SEQ ID NO: 2230 - RNA, 23 nt, Artificial Sequence
  Description of Artificial Sequence:  siNA sense region
accaaaccaugcuggauugcugg

SEQ ID NO: 2231 - RNA, 23 nt, Artificial Sequence
  Description of Artificial Sequence:  siNA sense region
ccagaccaugcuggacugcuggc

SEQ ID NO: 2232 - RNA, 23 nt, Artificial Sequence
  Description of Artificial Sequence:  siNA sense region
ucagaucaugcuggacugcuggc

SEQ ID NO: 2233 - RNA, 23 nt, Artificial Sequence
  Description of Artificial Sequence:  siNA sense region
ccaaaucauguuggauugcuggc

SEQ ID NO: 2234 - RNA, 23 nt, Artificial Sequence
  Description of Artificial Sequence:  siNA sense region
ccaaaucaugcuggauugcuggc

SEQ ID NO: 2235 - RNA, 23 nt, Artificial Sequence
  Description of Artificial Sequence:  siNA sense region
ccaaaccaugcuggauugcuggc

SEQ ID NO: 2236 - RNA, 23 nt, Artificial Sequence
  Description of Artificial Sequence:  siNA sense region
cagaccaugcuggacugcuggca

SEQ ID NO: 2237 - RNA, 23 nt, Artificial Sequence
  Description of Artificial Sequence:  siNA sense region
cagaucaugcuggacugcuggca

SEQ ID NO: 2238 - RNA, 23 nt, Artificial Sequence
  Description of Artificial Sequence:  siNA sense region
caaaucauguuggauugcuggca

SEQ ID NO: 2239 - RNA, 23 nt, Artificial Sequence
  Description of Artificial Sequence:  siNA sense region
caaaucaugcuggauugcuggca

SEQ ID NO: 2240 - RNA, 23 nt, Artificial Sequence
  Description of Artificial Sequence:  siNA sense region
caaaccaugcuggauugcuggca

SEQ ID NO: 2241 - RNA, 23 nt, Artificial Sequence
  Description of Artificial Sequence:  siNA sense region
agaccaugcuggacugcuggcac

SEQ ID NO: 2242 - RNA, 23 nt, Artificial Sequence
  Description of Artificial Sequence:  siNA sense region
agaucaugcuggacugcuggcac

SEQ ID NO: 2243 - RNA, 23 nt, Artificial Sequence
  Description of Artificial Sequence:  siNA sense region
aaaucauguuggauugcuggcac

SEQ ID NO: 2244 - RNA, 23 nt, Artificial Sequence
  Description of Artificial Sequence:  siNA sense region
agaccaugcuggacugcuggcau

SEQ ID NO: 2245 - RNA, 23 nt, Artificial Sequence
  Description of Artificial Sequence:  siNA sense region
aaaucaugcuggauugcuggcac

SEQ ID NO: 2246 - RNA, 23 nt, Artificial Sequence
  Description of Artificial Sequence:  siNA sense region
aaaccaugcuggauugcuggcau

SEQ ID NO: 2247 - RNA, 23 nt, Artificial Sequence
  Description of Artificial Sequence:  siNA sense region
gaccaugcuggacugcuggcacg

SEQ ID NO: 2248 - RNA, 23 nt, Artificial Sequence
  Description of Artificial Sequence:  siNA sense region
gaucaugcuggacugcuggcaca

SEQ ID NO: 2249 - RNA, 23 nt, Artificial Sequence
  Description of Artificial Sequence:  siNA sense region
aaucauguuggauugcuggcaca

SEQ ID NO: 2250 - RNA, 23 nt, Artificial Sequence
  Description of Artificial Sequence:  siNA sense region
gaccaugcuggacugcuggcaug

SEQ ID NO: 2251 - RNA, 23 nt, Artificial Sequence
  Description of Artificial Sequence:  siNA sense region
aaucaugcuggauugcuggcaca

SEQ ID NO: 2252 - RNA, 23 nt, Artificial Sequence
  Description of Artificial Sequence:  siNA sense region
aaccaugcuggauugcuggcaug

SEQ ID NO: 2253 - RNA, 23 nt, Artificial Sequence
  Description of Artificial Sequence:  siNA sense region
agcaggauggcaaagacuacauu

SEQ ID NO: 2254 - RNA, 23 nt, Artificial Sequence
  Description of Artificial Sequence:  siNA sense region
aacaggaugguaaagacuacauc

SEQ ID NO: 2255 - RNA, 23 nt, Artificial Sequence
  Description of Artificial Sequence:  siNA sense region
aacaggaugggaaagauuacauc

SEQ ID NO: 2256 - RNA, 23 nt, Artificial Sequence
  Description of Artificial Sequence:  siNA sense region
agcaggauggcaaagacuauauu

SEQ ID NO: 2257 - RNA, 23 nt, Artificial Sequence
  Description of Artificial Sequence:  siNA sense region
gcaggauggcaaagacuacauug

SEQ ID NO: 2258 - RNA, 23 nt, Artificial Sequence
  Description of Artificial Sequence:  siNA sense region
acaggaugguaaagacuacaucc

SEQ ID NO: 2259 - RNA, 23 nt, Artificial Sequence
  Description of Artificial Sequence:  siNA sense region
acaggaugggaaagauuacaucc

SEQ ID NO: 2260 - RNA, 23 nt, Artificial Sequence
  Description of Artificial Sequence:  siNA sense region
gcaggauggcaaagacuauauug

SEQ ID NO: 2261 - RNA, 12 nt, Artificial Sequence
  Description of Artificial Sequence:  siNA sense region
cuccuccccggc

SEQ ID NO: 2262 - RNA, 12 nt, Artificial Sequence
  Description of Artificial Sequence:  siNA sense region
ggagccgcgaga

SEQ ID NO: 2263 - RNA, 12 nt, Artificial Sequence
  Description of Artificial Sequence:  siNA sense region
ggccggcggcgg

SEQ ID NO: 2264 - RNA, 10 nt, Artificial Sequence
  Description of Artificial Sequence:  siNA sense region
gcggcggcga

SEQ ID NO: 2265 - RNA, 11 nt, Artificial Sequence
  Description of Artificial Sequence:  siNA sense region
uacccugauga

SEQ ID NO: 2266 - RNA, 10 nt, Artificial Sequence
  Description of Artificial Sequence:  siNA sense region
ggcuagcacc

SEQ ID NO: 2267 - RNA, 10 nt, Artificial Sequence
  Description of Artificial Sequence:  siNA sense region
agagggggcc

SEQ ID NO: 2268 - RNA, 12 nt, Artificial Sequence
  Description of Artificial Sequence:  siNA sense region
agcagcgaaagc

SEQ ID NO: 2269 - RNA, 11 nt, Artificial Sequence
  Description of Artificial Sequence:  siNA sense region
aggaagaggag

SEQ ID NO: 2270 - RNA, 10 nt, Artificial Sequence
  Description of Artificial Sequence:  siNA sense region
ccaggaguac

SEQ ID NO: 2271 - RNA, 10 nt, Artificial Sequence
  Description of Artificial Sequence:  siNA sense region
ccgcccccag

SEQ ID NO: 2272 - RNA, 10 nt, Artificial Sequence
  Description of Artificial Sequence:  siNA sense region
gugggccuug

SEQ ID NO: 2273 - RNA, 10 nt, Artificial Sequence
  Description of Artificial Sequence:  siNA sense region
cuuggggaga

SEQ ID NO: 2274 - RNA, 10 nt, Artificial Sequence
  Description of Artificial Sequence:  siNA sense region
ccucuucuuu

SEQ ID NO: 2275 - RNA, 10 nt, Artificial Sequence
  Description of Artificial Sequence:  siNA sense region
aagugaguga

SEQ ID NO: 2276 - RNA, 11 nt, Artificial Sequence
  Description of Artificial Sequence:  siNA sense region
ggaggaagagu

SEQ ID NO: 2277 - RNA, 11 nt, Artificial Sequence
  Description of Artificial Sequence:  siNA sense region
acaaaugugaa

SEQ ID NO: 2278 - RNA, 10 nt, Artificial Sequence
  Description of Artificial Sequence:  siNA sense region
gcccacugag

SEQ ID NO: 2279 - RNA, 10 nt, Artificial Sequence
  Description of Artificial Sequence:  siNA sense region
gccuugcuca

SEQ ID NO: 2280 - RNA, 10 nt, Artificial Sequence
  Description of Artificial Sequence:  siNA sense region
gaggaaggag

SEQ ID NO: 2281 - RNA, 10 nt, Artificial Sequence
  Description of Artificial Sequence:  siNA sense region
uuuggaaacc

SEQ ID NO: 2282 - RNA, 11 nt, Artificial Sequence
  Description of Artificial Sequence:  siNA sense region
ggaggaggaag

SEQ ID NO: 2283 - RNA, 10 nt, Artificial Sequence
  Description of Artificial Sequence:  siNA sense region
cggacagugg

SEQ ID NO: 2284 - RNA, 10 nt, Artificial Sequence
  Description of Artificial Sequence:  siNA sense region
ucccaggcug

SEQ ID NO: 2285 - RNA, 23 nt, Artificial Sequence
  Description of Artificial Sequence:  Target Sequence/siNA sense region
gcugucugcuucucacaggaucu

SEQ ID NO: 2286 - RNA, 23 nt, Artificial Sequence
  Description of Artificial Sequence:  Target Sequence/siNA sense region
gaaggagaggaccugaaacuguc

SEQ ID NO: 2287 - RNA, 23 nt, Artificial Sequence
  Description of Artificial Sequence:  Target Sequence/siNA sense region
aaggagaggaccugaaacugucu

SEQ ID NO: 2288 - RNA, 23 nt, Artificial Sequence
  Description of Artificial Sequence:  Target Sequence/siNA sense region
gcauuuggcauuaagaaaucacc

SEQ ID NO: 2289 - RNA, 23 nt, Artificial Sequence
  Description of Artificial Sequence:  Target Sequence/siNA sense region
aacugaguuuaaaaggcacccag

SEQ ID NO: 2290 - RNA, 23 nt, Artificial Sequence
  Description of Artificial Sequence:  Target Sequence/siNA sense region
aagcaaggagggccucugauggu

SEQ ID NO: 2291 - RNA, 23 nt, Artificial Sequence
  Description of Artificial Sequence:  Target Sequence/siNA sense region
agccuggaaagaaucaaaaccuu

SEQ ID NO: 2292 - RNA, 23 nt, Artificial Sequence
  Description of Artificial Sequence:  Target Sequence/siNA sense region
aacaaccacaaaauacaacaaga

SEQ ID NO: 2293 - RNA, 19 nt, Artificial Sequence
  Description of Artificial Sequence:  Target Sequence/siNA sense region
caugcuggacugcuggcac

SEQ ID NO: 2294 - RNA, 19 nt, Artificial Sequence
  Description of Artificial Sequence:  Target Sequence/siNA sense region
augcuggacugcuggcaca

SEQ ID NO: 2295 - RNA, 19 nt, Artificial Sequence
  Description of Artificial Sequence:  Target Sequence/siNA sense region
ugcuggacugcuggcacag

SEQ ID NO: 2296 - RNA, 23 nt, Artificial Sequence
  Description of Artificial Sequence:  Target Sequence/siNA sense region
cugaacugaguuuaaaaggcacc

SEQ ID NO: 2297 - RNA, 23 nt, Artificial Sequence
  Description of Artificial Sequence:  Target Sequence/siNA sense region
ugaacugaguuuaaaaggcaccc

SEQ ID NO: 2298 - RNA, 23 nt, Artificial Sequence
  Description of Artificial Sequence:  Target Sequence/siNA sense region
gaacugaguuuaaaaggcaccca

SEQ ID NO: 2299 - RNA, 23 nt, Artificial Sequence
  Description of Artificial Sequence:  Target Sequence/siNA sense region
acugaguuuaaaaggcacccagc

SEQ ID NO: 2300 - RNA, 23 nt, Artificial Sequence
  Description of Artificial Sequence:  Target Sequence/siNA sense region
cugaguuuaaaaggcacccagca

SEQ ID NO: 2301 - RNA, 23 nt, Artificial Sequence
  Description of Artificial Sequence:  Target Sequence/siNA sense region
ugaguuuaaaaggcacccagcac

SEQ ID NO: 2302 - RNA, 23 nt, Artificial Sequence
  Description of Artificial Sequence:  Target Sequence/siNA sense region
gaguuuaaaaggcacccagcaca

SEQ ID NO: 2303 - RNA, 23 nt, Artificial Sequence
  Description of Artificial Sequence:  Target Sequence/siNA sense region
ucguguaaggaguggaccaucau

SEQ ID NO: 2304 - RNA, 23 nt, Artificial Sequence
  Description of Artificial Sequence:  Target Sequence/siNA sense region
uuacggaguauugcugugggaaa

SEQ ID NO: 2305 - RNA, 23 nt, Artificial Sequence
  Description of Artificial Sequence:  Target Sequence/siNA sense region
uagcaggccuaagacaugugagg

SEQ ID NO: 2306 - RNA, 23 nt, Artificial Sequence
  Description of Artificial Sequence:  Target Sequence/siNA sense region
agcaaaaagcaagggagaaaaga

SEQ ID NO: 2307 - RNA, 23 nt, Artificial Sequence
  Description of Artificial Sequence:  Target Sequence/siNA sense region
accucacugccacucuaauuguc

SEQ ID NO: 2308 - RNA, 23 nt, Artificial Sequence
  Description of Artificial Sequence:  Target Sequence/siNA sense region
ccucacugccacucuaauuguca

SEQ ID NO: 2309 - RNA, 23 nt, Artificial Sequence
  Description of Artificial Sequence:  Target Sequence/siNA sense region
cucacugccacucuaauugucaa

SEQ ID NO: 2310 - RNA, 23 nt, Artificial Sequence
  Description of Artificial Sequence:  Target Sequence/siNA sense region
aagaccccgucucuauaccaacc

SEQ ID NO: 2311 - RNA, 23 nt, Artificial Sequence
  Description of Artificial Sequence:  Target Sequence/siNA sense region
gagcgggcuccggggcucgggug

SEQ ID NO: 2312 - RNA, 23 nt, Artificial Sequence
  Description of Artificial Sequence:  Target Sequence/siNA sense region
cuggcuggagccgcgagacgggc

SEQ ID NO: 2313 - RNA, 23 nt, Artificial Sequence
  Description of Artificial Sequence:  Target Sequence/siNA sense region
uggcuggagccgcgagacgggcg

SEQ ID NO: 2314 - RNA, 23 nt, Artificial Sequence
  Description of Artificial Sequence:  Target Sequence/siNA sense region
cauggucagcuacugggacaccg

SEQ ID NO: 2315 - RNA, 23 nt, Artificial Sequence
  Description of Artificial Sequence:  Target Sequence/siNA sense region
auggucagcuacugggacaccgg

SEQ ID NO: 2316 - RNA, 23 nt, Artificial Sequence
  Description of Artificial Sequence:  Target Sequence/siNA sense region
aguuuaaaaggcacccagcacau

SEQ ID NO: 2317 - RNA, 23 nt, Artificial Sequence
  Description of Artificial Sequence:  Target Sequence/siNA sense region
agcagcccauaaauggucuuugc

SEQ ID NO: 2318 - RNA, 23 nt, Artificial Sequence
  Description of Artificial Sequence:  Target Sequence/siNA sense region
ucaaagaagaaggaaacagaauc

SEQ ID NO: 2319 - RNA, 23 nt, Artificial Sequence
  Description of Artificial Sequence:  Target Sequence/siNA sense region
caaagaagaaggaaacagaaucu

SEQ ID NO: 2320 - RNA, 23 nt, Artificial Sequence
  Description of Artificial Sequence:  Target Sequence/siNA sense region
agcucgucauucccugccggguu

SEQ ID NO: 2321 - RNA, 23 nt, Artificial Sequence
  Description of Artificial Sequence:  Target Sequence/siNA sense region
gcucgucauucccugccggguua

SEQ ID NO: 2322 - RNA, 23 nt, Artificial Sequence
  Description of Artificial Sequence:  Target Sequence/siNA sense region
aaaaaaguuuccacuugacacuu

SEQ ID NO: 2323 - RNA, 23 nt, Artificial Sequence
  Description of Artificial Sequence:  Target Sequence/siNA sense region
aaaaaguuuccacuugacacuuu

SEQ ID NO: 2324 - RNA, 23 nt, Artificial Sequence
  Description of Artificial Sequence:  Target Sequence/siNA sense region
aacgcauaaucugggacaguaga

SEQ ID NO: 2325 - RNA, 23 nt, Artificial Sequence
  Description of Artificial Sequence:  Target Sequence/siNA sense region
acgcauaaucugggacaguagaa

SEQ ID NO: 2326 - RNA, 23 nt, Artificial Sequence
  Description of Artificial Sequence:  Target Sequence/siNA sense region
cgcauaaucugggacaguagaaa

SEQ ID NO: 2327 - RNA, 23 nt, Artificial Sequence
  Description of Artificial Sequence:  Target Sequence/siNA sense region
gcauaaucugggacaguagaaag

SEQ ID NO: 2328 - RNA, 23 nt, Artificial Sequence
  Description of Artificial Sequence:  Target Sequence/siNA sense region
caccucagugcauauauaugaua

SEQ ID NO: 2329 - RNA, 23 nt, Artificial Sequence
  Description of Artificial Sequence:  Target Sequence/siNA sense region
cugaagaggaugcagggaauuau

SEQ ID NO: 2330 - RNA, 23 nt, Artificial Sequence
  Description of Artificial Sequence:  Target Sequence/siNA sense region
uuacgaaaaggccgugucaucgu

SEQ ID NO: 2331 - RNA, 23 nt, Artificial Sequence
  Description of Artificial Sequence:  Target Sequence/siNA sense region
aaucaagugguucuggcaccccu

SEQ ID NO: 2332 - RNA, 23 nt, Artificial Sequence
  Description of Artificial Sequence:  Target Sequence/siNA sense region
accauaaucauuccgaagcaagg

SEQ ID NO: 2333 - RNA, 23 nt, Artificial Sequence
  Description of Artificial Sequence:  Target Sequence/siNA sense region
gacugugggaagaaacauaagcu

SEQ ID NO: 2334 - RNA, 23 nt, Artificial Sequence
  Description of Artificial Sequence:  Target Sequence/siNA sense region
aaccucagugaucacacaguggc

SEQ ID NO: 2335 - RNA, 23 nt, Artificial Sequence
  Description of Artificial Sequence:  Target Sequence/siNA sense region
accucagugaucacacaguggcc

SEQ ID NO: 2336 - RNA, 23 nt, Artificial Sequence
  Description of Artificial Sequence:  Target Sequence/siNA sense region
agagccuggaauuauuuuaggac

SEQ ID NO: 2337 - RNA, 23 nt, Artificial Sequence
  Description of Artificial Sequence:  Target Sequence/siNA sense region
acagaagaggaugaaggugucua

SEQ ID NO: 2338 - RNA, 23 nt, Artificial Sequence
  Description of Artificial Sequence:  Target Sequence/siNA sense region
ucuaaucuggagcugaucacucu

SEQ ID NO: 2339 - RNA, 23 nt, Artificial Sequence
  Description of Artificial Sequence:  Target Sequence/siNA sense region
aucuggagcugaucacucuaaca

SEQ ID NO: 2340 - RNA, 23 nt, Artificial Sequence
  Description of Artificial Sequence:  Target Sequence/siNA sense region
agcaagugggaguuugcccggga

SEQ ID NO: 2341 - RNA, 23 nt, Artificial Sequence
  Description of Artificial Sequence:  Target Sequence/siNA sense region
cauuaagaaaucaccuacgugcc

SEQ ID NO: 2342 - RNA, 23 nt, Artificial Sequence
  Description of Artificial Sequence:  Target Sequence/siNA sense region
ugauggugauuguugaauacugc

SEQ ID NO: 2343 - RNA, 23 nt, Artificial Sequence
  Description of Artificial Sequence:  Target Sequence/siNA sense region
gaaagaaaaaauggagccaggcc

SEQ ID NO: 2344 - RNA, 23 nt, Artificial Sequence
  Description of Artificial Sequence:  Target Sequence/siNA sense region
aacaaggcaagaaaccaagacua

SEQ ID NO: 2345 - RNA, 23 nt, Artificial Sequence
  Description of Artificial Sequence:  Target Sequence/siNA sense region
acaaggcaagaaaccaagacuag

SEQ ID NO: 2346 - RNA, 23 nt, Artificial Sequence
  Description of Artificial Sequence:  Target Sequence/siNA sense region
gagugauguugaggaagaggagg

SEQ ID NO: 2347 - RNA, 23 nt, Artificial Sequence
  Description of Artificial Sequence:  Target Sequence/siNA sense region
agugauguugaggaagaggagga

SEQ ID NO: 2348 - RNA, 23 nt, Artificial Sequence
  Description of Artificial Sequence:  Target Sequence/siNA sense region
cuuacaguuuucaaguggccaga

SEQ ID NO: 2349 - RNA, 23 nt, Artificial Sequence
  Description of Artificial Sequence:  Target Sequence/siNA sense region
uuacaguuuucaaguggccagag

SEQ ID NO: 2350 - RNA, 23 nt, Artificial Sequence
  Description of Artificial Sequence:  Target Sequence/siNA sense region
uuuucaaguggccagaggcaugg

SEQ ID NO: 2351 - RNA, 23 nt, Artificial Sequence
  Description of Artificial Sequence:  Target Sequence/siNA sense region
uuucaaguggccagaggcaugga

SEQ ID NO: 2352 - RNA, 23 nt, Artificial Sequence
  Description of Artificial Sequence:  Target Sequence/siNA sense region
uccagaaagugcauucaucggga

SEQ ID NO: 2353 - RNA, 23 nt, Artificial Sequence
  Description of Artificial Sequence:  Target Sequence/siNA sense region
agcgagaaacauucuuuuaucug

SEQ ID NO: 2354 - RNA, 23 nt, Artificial Sequence
  Description of Artificial Sequence:  Target Sequence/siNA sense region
gcgagaaacauucuuuuaucuga

SEQ ID NO: 2355 - RNA, 23 nt, Artificial Sequence
  Description of Artificial Sequence:  Target Sequence/siNA sense region
cgagaaacauucuuuuaucugag

SEQ ID NO: 2356 - RNA, 23 nt, Artificial Sequence
  Description of Artificial Sequence:  Target Sequence/siNA sense region
uugcugugggaaaucuucuccuu

SEQ ID NO: 2357 - RNA, 23 nt, Artificial Sequence
  Description of Artificial Sequence:  Target Sequence/siNA sense region
ugccuucucugaggacuucuuca

SEQ ID NO: 2358 - RNA, 23 nt, Artificial Sequence
  Description of Artificial Sequence:  Target Sequence/siNA sense region
ucaggaagcucugaugaugucag

SEQ ID NO: 2359 - RNA, 23 nt, Artificial Sequence
  Description of Artificial Sequence:  Target Sequence/siNA sense region
caggaagcucugaugaugucaga

SEQ ID NO: 2360 - RNA, 23 nt, Artificial Sequence
  Description of Artificial Sequence:  Target Sequence/siNA sense region
ucaaguucaugagccuggaaaga

SEQ ID NO: 2361 - RNA, 23 nt, Artificial Sequence
  Description of Artificial Sequence:  Target Sequence/siNA sense region
caaguucaugagccuggaaagaa

SEQ ID NO: 2362 - RNA, 23 nt, Artificial Sequence
  Description of Artificial Sequence:  Target Sequence/siNA sense region
ugagccuggaaagaaucaaaacc

SEQ ID NO: 2363 - RNA, 23 nt, Artificial Sequence
  Description of Artificial Sequence:  Target Sequence/siNA sense region
cagcugugggcacgucagcgaag

SEQ ID NO: 2364 - RNA, 23 nt, Artificial Sequence
  Description of Artificial Sequence:  Target Sequence/siNA sense region
cgaaggcaagcgcagguucaccu

SEQ ID NO: 2365 - RNA, 23 nt, Artificial Sequence
  Description of Artificial Sequence:  Target Sequence/siNA sense region
ugcagcccaaaacccagggcaac

SEQ ID NO: 2366 - RNA, 23 nt, Artificial Sequence
  Description of Artificial Sequence:  Target Sequence/siNA sense region
gaggcaagaaaaggacaaauauc

SEQ ID NO: 2367 - RNA, 23 nt, Artificial Sequence
  Description of Artificial Sequence:  Target Sequence/siNA sense region
uuggcuccucuaguaagaugcac

SEQ ID NO: 2368 - RNA, 23 nt, Artificial Sequence
  Description of Artificial Sequence:  Target Sequence/siNA sense region
gucuccaggccaugauggccuua

SEQ ID NO: 2369 - RNA, 23 nt, Artificial Sequence
  Description of Artificial Sequence:  Target Sequence/siNA sense region
ucuccaggccaugauggccuuac

SEQ ID NO: 2370 - RNA, 23 nt, Artificial Sequence
  Description of Artificial Sequence:  Target Sequence/siNA sense region
agaccccgucucuauaccaacca

SEQ ID NO: 2371 - RNA, 23 nt, Artificial Sequence
  Description of Artificial Sequence:  Target Sequence/siNA sense region
accccgucucuauaccaaccaaa

SEQ ID NO: 2372 - RNA, 23 nt, Artificial Sequence
  Description of Artificial Sequence:  Target Sequence/siNA sense region
ccccgucucuauaccaaccaaac

SEQ ID NO: 2373 - RNA, 23 nt, Artificial Sequence
  Description of Artificial Sequence:  Target Sequence/siNA sense region
gaucaagugggccuuggaucgcu

SEQ ID NO: 2374 - RNA, 23 nt, Artificial Sequence
  Description of Artificial Sequence:  Target Sequence/siNA sense region
aucaagugggccuuggaucgcua

SEQ ID NO: 2375 - RNA, 23 nt, Artificial Sequence
  Description of Artificial Sequence:  Target Sequence/siNA sense region
aaaacaaccacaaaauacaacaa

SEQ ID NO: 2376 - RNA, 23 nt, Artificial Sequence
  Description of Artificial Sequence:  Target Sequence/siNA sense region
caaccacaaaauacaacaagagc

SEQ ID NO: 2377 - RNA, 23 nt, Artificial Sequence
  Description of Artificial Sequence:  Target Sequence/siNA sense region
cuggaauuauuuuaggaccagga

SEQ ID NO: 2378 - RNA, 23 nt, Artificial Sequence
  Description of Artificial Sequence:  Target Sequence/siNA sense region
agcacgcuguuuauugaaagagu

SEQ ID NO: 2379 - RNA, 23 nt, Artificial Sequence
  Description of Artificial Sequence:  Target Sequence/siNA sense region
gcacgcuguuuauugaaagaguc

SEQ ID NO: 2380 - RNA, 23 nt, Artificial Sequence
  Description of Artificial Sequence:  Target Sequence/siNA sense region
cacgcuguuuauugaaagaguca

SEQ ID NO: 2381 - RNA, 23 nt, Artificial Sequence
  Description of Artificial Sequence:  Target Sequence/siNA sense region
acgcuguuuauugaaagagucac

SEQ ID NO: 2382 - RNA, 23 nt, Artificial Sequence
  Description of Artificial Sequence:  Target Sequence/siNA sense region
cgcuguuuauugaaagagucaca

SEQ ID NO: 2383 - RNA, 23 nt, Artificial Sequence
  Description of Artificial Sequence:  Target Sequence/siNA sense region
gcuguuuauugaaagagucacag

SEQ ID NO: 2384 - RNA, 23 nt, Artificial Sequence
  Description of Artificial Sequence:  Target Sequence/siNA sense region
cuguuuauugaaagagucacaga

SEQ ID NO: 2385 - RNA, 23 nt, Artificial Sequence
  Description of Artificial Sequence:  Target Sequence/siNA sense region
uguuuauugaaagagucacagaa

SEQ ID NO: 2386 - RNA, 23 nt, Artificial Sequence
  Description of Artificial Sequence:  Target Sequence/siNA sense region
gaugccagcaagugggaguuugc

SEQ ID NO: 2387 - RNA, 23 nt, Artificial Sequence
  Description of Artificial Sequence:  Target Sequence/siNA sense region
ugccagcaagugggaguuugccc

SEQ ID NO: 2388 - RNA, 23 nt, Artificial Sequence
  Description of Artificial Sequence:  Target Sequence/siNA sense region
cagcauuuggcauuaagaaauca

SEQ ID NO: 2389 - RNA, 23 nt, Artificial Sequence
  Description of Artificial Sequence:  Target Sequence/siNA sense region
agcauuuggcauuaagaaaucac

SEQ ID NO: 2390 - RNA, 23 nt, Artificial Sequence
  Description of Artificial Sequence:  Target Sequence/siNA sense region
cauuuggcauuaagaaaucaccu

SEQ ID NO: 2391 - RNA, 23 nt, Artificial Sequence
  Description of Artificial Sequence:  Target Sequence/siNA sense region
auuuggcauuaagaaaucaccua

SEQ ID NO: 2392 - RNA, 23 nt, Artificial Sequence
  Description of Artificial Sequence:  Target Sequence/siNA sense region
cgugccggacuguggcugugaaa

SEQ ID NO: 2393 - RNA, 23 nt, Artificial Sequence
  Description of Artificial Sequence:  Target Sequence/siNA sense region
gcgaguacaaagcucugaugacu

SEQ ID NO: 2394 - RNA, 23 nt, Artificial Sequence
  Description of Artificial Sequence:  Target Sequence/siNA sense region
cgaguacaaagcucugaugacug

SEQ ID NO: 2395 - RNA, 23 nt, Artificial Sequence
  Description of Artificial Sequence:  Target Sequence/siNA sense region
ccaagcaaggagggccucugaug

SEQ ID NO: 2396 - RNA, 23 nt, Artificial Sequence
  Description of Artificial Sequence:  Target Sequence/siNA sense region
agcaaggagggccucugauggug

SEQ ID NO: 2397 - RNA, 23 nt, Artificial Sequence
  Description of Artificial Sequence:  Target Sequence/siNA sense region
caaggagggccucugauggugau

SEQ ID NO: 2398 - RNA, 23 nt, Artificial Sequence
  Description of Artificial Sequence:  Target Sequence/siNA sense region
aaggagggccucugauggugauu

SEQ ID NO: 2399 - RNA, 23 nt, Artificial Sequence
  Description of Artificial Sequence:  Target Sequence/siNA sense region
aggagggccucugauggugauug

SEQ ID NO: 2400 - RNA, 23 nt, Artificial Sequence
  Description of Artificial Sequence:  Target Sequence/siNA sense region
uucaaguggccagaggcauggag

SEQ ID NO: 2401 - RNA, 23 nt, Artificial Sequence
  Description of Artificial Sequence:  Target Sequence/siNA sense region
ucaaguggccagaggcauggagu

SEQ ID NO: 2402 - RNA, 23 nt, Artificial Sequence
  Description of Artificial Sequence:  Target Sequence/siNA sense region
aguggccagaggcauggaguucc

SEQ ID NO: 2403 - RNA, 23 nt, Artificial Sequence
  Description of Artificial Sequence:  Target Sequence/siNA sense region
gagccuggaaagaaucaaaaccu

SEQ ID NO: 2404 - RNA, 23 nt, Artificial Sequence
  Description of Artificial Sequence:  Target Sequence/siNA sense region
uuuuuugacuaacaagaauguaa

SEQ ID NO: 2405 - RNA, 23 nt, Artificial Sequence
  Description of Artificial Sequence:  Target Sequence/siNA sense region
ugaccuuggagcaucucaucugu

SEQ ID NO: 2406 - RNA, 23 nt, Artificial Sequence
  Description of Artificial Sequence:  Target Sequence/siNA sense region
ucaccuguuuccuguauggagga

SEQ ID NO: 2407 - RNA, 23 nt, Artificial Sequence
  Description of Artificial Sequence:  Target Sequence/siNA sense region
uuugagcauggaagaggauucug

SEQ ID NO: 2408 - RNA, 23 nt, Artificial Sequence
  Description of Artificial Sequence:  Target Sequence/siNA sense region
gacaacacagcaggaaucaguca

SEQ ID NO: 2409 - RNA, 23 nt, Artificial Sequence
  Description of Artificial Sequence:  Target Sequence/siNA sense region
uguccacuuaccugaggagcaag

SEQ ID NO: 2410 - RNA, 23 nt, Artificial Sequence
  Description of Artificial Sequence:  Target Sequence/siNA sense region
augguucuugccucagaagagcu

SEQ ID NO: 2411 - RNA, 23 nt, Artificial Sequence
  Description of Artificial Sequence:  Target Sequence/siNA sense region
ucugaaggcucaaaccagacaag

SEQ ID NO: 2412 - RNA, 19 nt, Artificial Sequence
  Description of Artificial Sequence:  Target Sequence/siNA sense region
ccuuaugaugccagcaaau

SEQ ID NO: 2413 - RNA, 19 nt, Artificial Sequence
  Description of Artificial Sequence:  Target Sequence/siNA sense region
cuuaugaugccagcaaaug

SEQ ID NO: 2414 - RNA, 19 nt, Artificial Sequence
  Description of Artificial Sequence:  Target Sequence/siNA sense region
uuaugaugccagcaaaugg

SEQ ID NO: 2415 - RNA, 19 nt, Artificial Sequence
  Description of Artificial Sequence:  Target Sequence/siNA sense region
uaugaugccagcaaauggg

SEQ ID NO: 2416 - RNA, 19 nt, Artificial Sequence
  Description of Artificial Sequence:  Target Sequence/siNA sense region
augaugccagcaaauggga

SEQ ID NO: 2417 - RNA, 19 nt, Artificial Sequence
  Description of Artificial Sequence:  Target Sequence/siNA sense region
cagaccaugcuggacugcu

SEQ ID NO: 2418 - RNA, 19 nt, Artificial Sequence
  Description of Artificial Sequence:  Target Sequence/siNA sense region
agaccaugcuggacugcug

SEQ ID NO: 2419 - RNA, 19 nt, Artificial Sequence
  Description of Artificial Sequence:  Target Sequence/siNA sense region
gaccaugcuggacugcugg

SEQ ID NO: 2420 - RNA, 19 nt, Artificial Sequence
  Description of Artificial Sequence:  Target Sequence/siNA sense region
accaugcuggacugcuggc

SEQ ID NO: 2421 - RNA, 19 nt, Artificial Sequence
  Description of Artificial Sequence:  Target Sequence/siNA sense region
ccaugcuggacugcuggca

SEQ ID NO: 2422 - RNA, 19 nt, Artificial Sequence
  Description of Artificial Sequence:  Target Sequence/siNA sense region
caggauggcaaagacuaca

SEQ ID NO: 2423 - RNA, 19 nt, Artificial Sequence
  Description of Artificial Sequence:  Target Sequence/siNA sense region
aggauggcaaagacuacau

SEQ ID NO: 2424 - RNA, 23 nt, Artificial Sequence
  Description of Artificial Sequence:  Target Sequence/siNA sense region
aacagaauuuccugggacagcaa

SEQ ID NO: 2425 - RNA, 23 nt, Artificial Sequence
  Description of Artificial Sequence:  Target Sequence/siNA sense region
uggagcaucucaucuguuacagc

SEQ ID NO: 2426 - RNA, 23 nt, Artificial Sequence
  Description of Artificial Sequence:  Target Sequence/siNA sense region
cacguuuucagaguugguggaac

SEQ ID NO: 2427 - RNA, 23 nt, Artificial Sequence
  Description of Artificial Sequence:  Target Sequence/siNA sense region
cucaccuguuuccuguauggagg

SEQ ID NO: 2428 - RNA, 23 nt, Artificial Sequence
  Description of Artificial Sequence:  Target Sequence/siNA sense region
ucagaguggcagugagcaaaggg

SEQ ID NO: 2429 - RNA, 23 nt, Artificial Sequence
  Description of Artificial Sequence:  Target Sequence/siNA sense region
ccgcagaaaguccgucuggcagc

SEQ ID NO: 2430 - RNA, 23 nt, Artificial Sequence
  Description of Artificial Sequence:  Target Sequence/siNA sense region
cgcagaaaguccgucuggcagcc

SEQ ID NO: 2431 - RNA, 23 nt, Artificial Sequence
  Description of Artificial Sequence:  Target Sequence/siNA sense region
gcagaaaguccgucuggcagccu

SEQ ID NO: 2432 - RNA, 23 nt, Artificial Sequence
  Description of Artificial Sequence:  Target Sequence/siNA sense region
uggcagccuggauauccucuccu

SEQ ID NO: 2433 - RNA, 23 nt, Artificial Sequence
  Description of Artificial Sequence:  Target Sequence/siNA sense region
ggcagccuggauauccucuccua

SEQ ID NO: 2434 - RNA, 23 nt, Artificial Sequence
  Description of Artificial Sequence:  Target Sequence/siNA sense region
cccgggcucccuagcccugugcg

SEQ ID NO: 2435 - RNA, 23 nt, Artificial Sequence
  Description of Artificial Sequence:  Target Sequence/siNA sense region
ccgggcucccuagcccugugcgc

SEQ ID NO: 2436 - RNA, 23 nt, Artificial Sequence
  Description of Artificial Sequence:  Target Sequence/siNA sense region
ccuccuucucuagacaggcgcug

SEQ ID NO: 2437 - RNA, 23 nt, Artificial Sequence
  Description of Artificial Sequence:  Target Sequence/siNA sense region
cuccuucucuagacaggcgcugg

SEQ ID NO: 2438 - RNA, 23 nt, Artificial Sequence
  Description of Artificial Sequence:  Target Sequence/siNA sense region
uccuucucuagacaggcgcuggg

SEQ ID NO: 2439 - RNA, 23 nt, Artificial Sequence
  Description of Artificial Sequence:  Target Sequence/siNA sense region
aggguggaggugacugagugcag

SEQ ID NO: 2440 - RNA, 23 nt, Artificial Sequence
  Description of Artificial Sequence:  Target Sequence/siNA sense region
ggguggaggugacugagugcagc

SEQ ID NO: 2441 - RNA, 23 nt, Artificial Sequence
  Description of Artificial Sequence:  Target Sequence/siNA sense region
gcuggcauggucuucugugaagc

SEQ ID NO: 2442 - RNA, 23 nt, Artificial Sequence
  Description of Artificial Sequence:  Target Sequence/siNA sense region
cuggcauggucuucugugaagca

SEQ ID NO: 2443 - RNA, 23 nt, Artificial Sequence
  Description of Artificial Sequence:  Target Sequence/siNA sense region
ugaagcaaaaauuaaugaugaaa

SEQ ID NO: 2444 - RNA, 23 nt, Artificial Sequence
  Description of Artificial Sequence:  Target Sequence/siNA sense region
gaagcaaaaauuaaugaugaaag

SEQ ID NO: 2445 - RNA, 23 nt, Artificial Sequence
  Description of Artificial Sequence:  Target Sequence/siNA sense region
ccaagaagaacagcacauuuguc

SEQ ID NO: 2446 - RNA, 23 nt, Artificial Sequence
  Description of Artificial Sequence:  Target Sequence/siNA sense region
agcacauuugucaggguccauga

SEQ ID NO: 2447 - RNA, 23 nt, Artificial Sequence
  Description of Artificial Sequence:  Target Sequence/siNA sense region
aguggcauggaaucucuggugga

SEQ ID NO: 2448 - RNA, 23 nt, Artificial Sequence
  Description of Artificial Sequence:  Target Sequence/siNA sense region
aaucucugguggaagccacggug

SEQ ID NO: 2449 - RNA, 23 nt, Artificial Sequence
  Description of Artificial Sequence:  Target Sequence/siNA sense region
ggucucucugguuguguaugucc

SEQ ID NO: 2450 - RNA, 23 nt, Artificial Sequence
  Description of Artificial Sequence:  Target Sequence/siNA sense region
gucucucugguuguguauguccc

SEQ ID NO: 2451 - RNA, 23 nt, Artificial Sequence
  Description of Artificial Sequence:  Target Sequence/siNA sense region
uaaucucuccuguggauuccuac

SEQ ID NO: 2452 - RNA, 23 nt, Artificial Sequence
  Description of Artificial Sequence:  Target Sequence/siNA sense region
aaucucuccuguggauuccuacc

SEQ ID NO: 2453 - RNA, 23 nt, Artificial Sequence
  Description of Artificial Sequence:  Target Sequence/siNA sense region
gugucagcuuuguacaaauguga

SEQ ID NO: 2454 - RNA, 23 nt, Artificial Sequence
  Description of Artificial Sequence:  Target Sequence/siNA sense region
gacaagacagcaacuugcaggac

SEQ ID NO: 2455 - RNA, 23 nt, Artificial Sequence
  Description of Artificial Sequence:  Target Sequence/siNA sense region
acaagacagcaacuugcaggaca

SEQ ID NO: 2456 - RNA, 23 nt, Artificial Sequence
  Description of Artificial Sequence:  Target Sequence/siNA sense region
caagacagcaacuugcaggacag

SEQ ID NO: 2457 - RNA, 23 nt, Artificial Sequence
  Description of Artificial Sequence:  Target Sequence/siNA sense region
cucauggugauuguggaauucug

SEQ ID NO: 2458 - RNA, 23 nt, Artificial Sequence
  Description of Artificial Sequence:  Target Sequence/siNA sense region
ucauggugauuguggaauucugc

SEQ ID NO: 2459 - RNA, 23 nt, Artificial Sequence
  Description of Artificial Sequence:  Target Sequence/siNA sense region
ucccucagugauguagaagaaga

SEQ ID NO: 2460 - RNA, 23 nt, Artificial Sequence
  Description of Artificial Sequence:  Target Sequence/siNA sense region
agaagaagaggaagcuccugaag

SEQ ID NO: 2461 - RNA, 23 nt, Artificial Sequence
  Description of Artificial Sequence:  Target Sequence/siNA sense region
gaagaagaggaagcuccugaaga

SEQ ID NO: 2462 - RNA, 23 nt, Artificial Sequence
  Description of Artificial Sequence:  Target Sequence/siNA sense region
agaggaagcuccugaagaucugu

SEQ ID NO: 2463 - RNA, 23 nt, Artificial Sequence
  Description of Artificial Sequence:  Target Sequence/siNA sense region
gaggaagcuccugaagaucugua

SEQ ID NO: 2464 - RNA, 23 nt, Artificial Sequence
  Description of Artificial Sequence:  Target Sequence/siNA sense region
agggcauggaguucuuggcaucg

SEQ ID NO: 2465 - RNA, 23 nt, Artificial Sequence
  Description of Artificial Sequence:  Target Sequence/siNA sense region
uugcugugggaaauauuuuccuu

SEQ ID NO: 2466 - RNA, 23 nt, Artificial Sequence
  Description of Artificial Sequence:  Target Sequence/siNA sense region
ugcugugggaaauauuuuccuua

SEQ ID NO: 2467 - RNA, 23 nt, Artificial Sequence
  Description of Artificial Sequence:  Target Sequence/siNA sense region
cauggaagaggauucuggacucu

SEQ ID NO: 2468 - RNA, 23 nt, Artificial Sequence
  Description of Artificial Sequence:  Target Sequence/siNA sense region
gacucucucugccuaccucaccu

SEQ ID NO: 2469 - RNA, 23 nt, Artificial Sequence
  Description of Artificial Sequence:  Target Sequence/siNA sense region
acucucucugccuaccucaccug

SEQ ID NO: 2470 - RNA, 23 nt, Artificial Sequence
  Description of Artificial Sequence:  Target Sequence/siNA sense region
aagcugauagagauuggagugca

SEQ ID NO: 2471 - RNA, 23 nt, Artificial Sequence
  Description of Artificial Sequence:  Target Sequence/siNA sense region
agcugauagagauuggagugcaa

SEQ ID NO: 2472 - RNA, 23 nt, Artificial Sequence
  Description of Artificial Sequence:  Target Sequence/siNA sense region
gcacagcccagauucuccagccu

SEQ ID NO: 2473 - RNA, 23 nt, Artificial Sequence
  Description of Artificial Sequence:  Target Sequence/siNA sense region
cacagcccagauucuccagccug

SEQ ID NO: 2474 - RNA, 23 nt, Artificial Sequence
  Description of Artificial Sequence:  Target Sequence/siNA sense region
acagcccagauucuccagccuga

SEQ ID NO: 2475 - RNA, 23 nt, Artificial Sequence
  Description of Artificial Sequence:  Target Sequence/siNA sense region
cagcccagauucuccagccugac

SEQ ID NO: 2476 - RNA, 23 nt, Artificial Sequence
  Description of Artificial Sequence:  Target Sequence/siNA sense region
agcucuccuccuguuuaaaagga

SEQ ID NO: 2477 - RNA, 23 nt, Artificial Sequence
  Description of Artificial Sequence:  Target Sequence/siNA sense region
uauccuggaagaggcuugugacc

SEQ ID NO: 2478 - RNA, 23 nt, Artificial Sequence
  Description of Artificial Sequence:  Target Sequence/siNA sense region
auccuggaagaggcuugugaccc

SEQ ID NO: 2479 - RNA, 23 nt, Artificial Sequence
  Description of Artificial Sequence:  Target Sequence/siNA sense region
uccuggaagaggcuugugaccca

SEQ ID NO: 2480 - RNA, 23 nt, Artificial Sequence
  Description of Artificial Sequence:  Target Sequence/siNA sense region
uggaagaggcuugugacccaaga

SEQ ID NO: 2481 - RNA, 23 nt, Artificial Sequence
  Description of Artificial Sequence:  Target Sequence/siNA sense region
uguugaagaugggaaggauuugc

SEQ ID NO: 2482 - RNA, 23 nt, Artificial Sequence
  Description of Artificial Sequence:  Target Sequence/siNA sense region
ucugguggaggugggcauggggu

SEQ ID NO: 2483 - RNA, 23 nt, Artificial Sequence
  Description of Artificial Sequence:  Target Sequence/siNA sense region
ucguugugcuguuucugacuccu

SEQ ID NO: 2484 - RNA, 23 nt, Artificial Sequence
  Description of Artificial Sequence:  Target Sequence/siNA sense region
cguugugcuguuucugacuccua

SEQ ID NO: 2485 - RNA, 23 nt, Artificial Sequence
  Description of Artificial Sequence:  Target Sequence/siNA sense region
guugugcuguuucugacuccuaa

SEQ ID NO: 2486 - RNA, 23 nt, Artificial Sequence
  Description of Artificial Sequence:  Target Sequence/siNA sense region
ucaaaguuucaggaaggauuuua

SEQ ID NO: 2487 - RNA, 23 nt, Artificial Sequence
  Description of Artificial Sequence:  Target Sequence/siNA sense region
caaaguuucaggaaggauuuuac

SEQ ID NO: 2488 - RNA, 23 nt, Artificial Sequence
  Description of Artificial Sequence:  Target Sequence/siNA sense region
aaaguuucaggaaggauuuuacc

SEQ ID NO: 2489 - RNA, 23 nt, Artificial Sequence
  Description of Artificial Sequence:  Target Sequence/siNA sense region
ucaaaaaagaaaauguguuuuuu

SEQ ID NO: 2490 - RNA, 23 nt, Artificial Sequence
  Description of Artificial Sequence:  Target Sequence/siNA sense region
cuauucacauuuuguaucaguau

SEQ ID NO: 2491 - RNA, 23 nt, Artificial Sequence
  Description of Artificial Sequence:  Target Sequence/siNA sense region
uauucacauuuuguaucaguauu

SEQ ID NO: 2492 - RNA, 23 nt, Artificial Sequence
  Description of Artificial Sequence:  Target Sequence/siNA sense region
auucacauuuuguaucaguauua

SEQ ID NO: 2493 - RNA, 23 nt, Artificial Sequence
  Description of Artificial Sequence:  Target Sequence/siNA sense region
ggccgccucuguggguuugccua

SEQ ID NO: 2494 - RNA, 23 nt, Artificial Sequence
  Description of Artificial Sequence:  Target Sequence/siNA sense region
gccgccucuguggguuugccuag

SEQ ID NO: 2495 - RNA, 23 nt, Artificial Sequence
  Description of Artificial Sequence:  Target Sequence/siNA sense region
acccagaaaagagauuuguuccu

SEQ ID NO: 2496 - RNA, 23 nt, Artificial Sequence
  Description of Artificial Sequence:  Target Sequence/siNA sense region
guaacagaauuuccugggacagc

SEQ ID NO: 2497 - RNA, 23 nt, Artificial Sequence
  Description of Artificial Sequence:  Target Sequence/siNA sense region
agcuugucuuaaauuguacagca

SEQ ID NO: 2498 - RNA, 23 nt, Artificial Sequence
  Description of Artificial Sequence:  Target Sequence/siNA sense region
gaaggaaaaaacaaaacuguaag

SEQ ID NO: 2499 - RNA, 23 nt, Artificial Sequence
  Description of Artificial Sequence:  Target Sequence/siNA sense region
aaggaaaaaacaaaacuguaagu

SEQ ID NO: 2500 - RNA, 23 nt, Artificial Sequence
  Description of Artificial Sequence:  Target Sequence/siNA sense region
accagggguccugaaauuacuuu

SEQ ID NO: 2501 - RNA, 23 nt, Artificial Sequence
  Description of Artificial Sequence:  Target Sequence/siNA sense region
aagaccaagaaaagacauugcgu

SEQ ID NO: 2502 - RNA, 23 nt, Artificial Sequence
  Description of Artificial Sequence:  Target Sequence/siNA sense region
aggccucuacaccugccaggcau

SEQ ID NO: 2503 - RNA, 23 nt, Artificial Sequence
  Description of Artificial Sequence:  Target Sequence/siNA sense region
gauugccauguucuucuggcuac

SEQ ID NO: 2504 - RNA, 23 nt, Artificial Sequence
  Description of Artificial Sequence:  Target Sequence/siNA sense region
ggaggggaacugaagacaggcua

SEQ ID NO: 2505 - RNA, 23 nt, Artificial Sequence
  Description of Artificial Sequence:  Target Sequence/siNA sense region
ggggaacugaagacaggcuacuu

SEQ ID NO: 2506 - RNA, 23 nt, Artificial Sequence
  Description of Artificial Sequence:  Target Sequence/siNA sense region
gggaacugaagacaggcuacuug

SEQ ID NO: 2507 - RNA, 23 nt, Artificial Sequence
  Description of Artificial Sequence:  Target Sequence/siNA sense region
ggaacugaagacaggcuacuugu

SEQ ID NO: 2508 - RNA, 23 nt, Artificial Sequence
  Description of Artificial Sequence:  Target Sequence/siNA sense region
aacugaagacaggcuacuugucc

SEQ ID NO: 2509 - RNA, 23 nt, Artificial Sequence
  Description of Artificial Sequence:  Target Sequence/siNA sense region
acugccuuaugaugccagcaaau

SEQ ID NO: 2510 - RNA, 23 nt, Artificial Sequence
  Description of Artificial Sequence:  Target Sequence/siNA sense region
ggcgcuuggacagcaucaccagu

SEQ ID NO: 2511 - RNA, 23 nt, Artificial Sequence
  Description of Artificial Sequence:  Target Sequence/siNA sense region
uaaggacuuccugaccuuggagc

SEQ ID NO: 2512 - RNA, 23 nt, Artificial Sequence
  Description of Artificial Sequence:  Target Sequence/siNA sense region
accuuggagcaucucaucuguua

SEQ ID NO: 2513 - RNA, 23 nt, Artificial Sequence
  Description of Artificial Sequence:  Target Sequence/siNA sense region
cuuggagcaucucaucuguuaca

SEQ ID NO: 2514 - RNA, 23 nt, Artificial Sequence
  Description of Artificial Sequence:  Target Sequence/siNA sense region
uuggagcaucucaucuguuacag

SEQ ID NO: 2515 - RNA, 23 nt, Artificial Sequence
  Description of Artificial Sequence:  Target Sequence/siNA sense region
gagcaucucaucuguuacagcuu

SEQ ID NO: 2516 - RNA, 23 nt, Artificial Sequence
  Description of Artificial Sequence:  Target Sequence/siNA sense region
caucuguuacagcuuccaagugg

SEQ ID NO: 2517 - RNA, 23 nt, Artificial Sequence
  Description of Artificial Sequence:  Target Sequence/siNA sense region
uguuacagcuuccaaguggcuaa

SEQ ID NO: 2518 - RNA, 23 nt, Artificial Sequence
  Description of Artificial Sequence:  Target Sequence/siNA sense region
uccaaguggcuaagggcauggag

SEQ ID NO: 2519 - RNA, 23 nt, Artificial Sequence
  Description of Artificial Sequence:  Target Sequence/siNA sense region
gggcauggaguucuuggcaucgc

SEQ ID NO: 2520 - RNA, 23 nt, Artificial Sequence
  Description of Artificial Sequence:  Target Sequence/siNA sense region
gagcauggaagaggauucuggac

SEQ ID NO: 2521 - RNA, 23 nt, Artificial Sequence
  Description of Artificial Sequence:  Target Sequence/siNA sense region
agcauggaagaggauucuggacu

SEQ ID NO: 2522 - RNA, 23 nt, Artificial Sequence
  Description of Artificial Sequence:  Target Sequence/siNA sense region
cucugccuaccucaccuguuucc

SEQ ID NO: 2523 - RNA, 23 nt, Artificial Sequence
  Description of Artificial Sequence:  Target Sequence/siNA sense region
ucugccuaccucaccuguuuccu

SEQ ID NO: 2524 - RNA, 23 nt, Artificial Sequence
  Description of Artificial Sequence:  Target Sequence/siNA sense region
cugccuaccucaccuguuuccug

SEQ ID NO: 2525 - RNA, 23 nt, Artificial Sequence
  Description of Artificial Sequence:  Target Sequence/siNA sense region
ccucaccuguuuccuguauggag

SEQ ID NO: 2526 - RNA, 23 nt, Artificial Sequence
  Description of Artificial Sequence:  Target Sequence/siNA sense region
aaauuccauuaugacaacacagc

SEQ ID NO: 2527 - RNA, 23 nt, Artificial Sequence
  Description of Artificial Sequence:  Target Sequence/siNA sense region
uccauuaugacaacacagcagga

SEQ ID NO: 2528 - RNA, 23 nt, Artificial Sequence
  Description of Artificial Sequence:  Target Sequence/siNA sense region
agcacugccacaagaaguaccug

SEQ ID NO: 2529 - RNA, 23 nt, Artificial Sequence
  Description of Artificial Sequence:  Target Sequence/siNA sense region
cugaagcagagagagagaaggca

SEQ ID NO: 2530 - RNA, 23 nt, Artificial Sequence
  Description of Artificial Sequence:  Target Sequence/siNA sense region
aaagaggaaccaggaggacaaga

SEQ ID NO: 2531 - RNA, 23 nt, Artificial Sequence
  Description of Artificial Sequence:  Target Sequence/siNA sense region
gacaagaggagcaugaaagugga

SEQ ID NO: 2532 - RNA, 23 nt, Artificial Sequence
  Description of Artificial Sequence:  Target Sequence/siNA sense region
acuucuaugugaccaccaucccc

SEQ ID NO: 2533 - RNA, 23 nt, Artificial Sequence
  Description of Artificial Sequence:  Target Sequence/siNA sense region
caagcacugccacaagaaguacc

SEQ ID NO: 2534 - RNA, 23 nt, Artificial Sequence
  Description of Artificial Sequence:  Target Sequence/siNA sense region
aguacggcaaccucuccaacuuc

SEQ ID NO: 2535 - RNA, 23 nt, Artificial Sequence
  Description of Artificial Sequence:  Target Sequence/siNA sense region
cugccauguacaagugugugguc

SEQ ID NO: 2536 - RNA, 23 nt, Artificial Sequence
  Description of Artificial Sequence:  Target Sequence/siNA sense region
acugccacaagaaguaccugucg

SEQ ID NO: 2537 - RNA, 23 nt, Artificial Sequence
  Description of Artificial Sequence:  Target Sequence/siNA sense region
uggugaagaucugugacuuuggc

SEQ ID NO: 2538 - RNA, 23 nt, Artificial Sequence
  Description of Artificial Sequence:  Target Sequence/siNA sense region
gaagaucugugacuuuggccuug

SEQ ID NO: 2539 - RNA, 23 nt, Artificial Sequence
  Description of Artificial Sequence:  Target Sequence/siNA sense region
gcaagagcuccagagagaagucg

SEQ ID NO: 2540 - RNA, 23 nt, Artificial Sequence
  Description of Artificial Sequence:  Target Sequence/siNA sense region
caaagugagugaccugcuuuugg

SEQ ID NO: 2541 - RNA, 23 nt, Artificial Sequence
  Description of Artificial Sequence:  Target Sequence/siNA sense region
acgaaguggugaaguucauggau

SEQ ID NO: 2542 - RNA, 23 nt, Artificial Sequence
  Description of Artificial Sequence:  Target Sequence/siNA sense region
gguggacaucuuccaggaguacc

SEQ ID NO: 2543 - RNA, 23 nt, Artificial Sequence
  Description of Artificial Sequence:  Target Sequence/siNA sense region
guggacaucuuccaggaguaccc

SEQ ID NO: 2544 - RNA, 23 nt, Artificial Sequence
  Description of Artificial Sequence:  Target Sequence/siNA sense region
ggacaucuuccaggaguacccug

SEQ ID NO: 2545 - RNA, 23 nt, Artificial Sequence
  Description of Artificial Sequence:  Target Sequence/siNA sense region
aguccaacaucaccaugcagauu

SEQ ID NO: 2546 - RNA, 23 nt, Artificial Sequence
  Description of Artificial Sequence:  Target Sequence/siNA sense region
cgaacguacuugcagaugugaca

SEQ ID NO: 2547 - RNA, 23 nt, Artificial Sequence
  Description of Artificial Sequence:  Target Sequence/siNA sense region
agacccugguggacaucuuccag

SEQ ID NO: 2548 - RNA, 23 nt, Artificial Sequence
  Description of Artificial Sequence:  Target Sequence/siNA sense region
uaugcggaucaaaccucaccaag

SEQ ID NO: 2549 - RNA, 23 nt, Artificial Sequence
  Description of Artificial Sequence:  Target Sequence/siNA sense region
aaaugugaaugcagaccaaagaa

SEQ ID NO: 2550 - RNA, 23 nt, Artificial Sequence
  Description of Artificial Sequence:  Target Sequence/siNA sense region
aaugugaaugcagaccaaagaaa

SEQ ID NO: 2551 - RNA, 23 nt, Artificial Sequence
  Description of Artificial Sequence:  Target Sequence/siNA sense region
augugaaugcagaccaaagaaag

SEQ ID NO: 2552 - RNA, 23 nt, Artificial Sequence
  Description of Artificial Sequence:  Target Sequence/siNA sense region
gugaaugcagaccaaagaaagau

SEQ ID NO: 2553 - RNA, 23 nt, Artificial Sequence
  Description of Artificial Sequence:  Target Sequence/siNA sense region
cagacguguaaauguuccugcaa

SEQ ID NO: 2554 - RNA, 23 nt, Artificial Sequence
  Description of Artificial Sequence:  Target Sequence/siNA sense region
cguguaaauguuccugcaaaaac

SEQ ID NO: 2555 - RNA, 23 nt, Artificial Sequence
  Description of Artificial Sequence:  Target Sequence/siNA sense region
guguaaauguuccugcaaaaaca

SEQ ID NO: 2556 - RNA, 23 nt, Artificial Sequence
  Description of Artificial Sequence:  Target Sequence/siNA sense region
uguaaauguuccugcaaaaacac

SEQ ID NO: 2557 - RNA, 23 nt, Artificial Sequence
  Description of Artificial Sequence:  Target Sequence/siNA sense region
guaaauguuccugcaaaaacaca

SEQ ID NO: 2558 - RNA, 23 nt, Artificial Sequence
  Description of Artificial Sequence:  Target Sequence/siNA sense region
cugcaaaaacacagacucgcguu

SEQ ID NO: 2559 - RNA, 23 nt, Artificial Sequence
  Description of Artificial Sequence:  Target Sequence/siNA sense region
gcagcuugaguuaaacgaacgua

SEQ ID NO: 2560 - RNA, 23 nt, Artificial Sequence
  Description of Artificial Sequence:  Target Sequence/siNA sense region
cguacuugcagaugugacaagcc

SEQ ID NO: 2561 - RNA, 23 nt, Artificial Sequence
  Description of Artificial Sequence:  Target Sequence/siNA sense region
gagacccugguggacaucuucca

SEQ ID NO: 2562 - RNA, 23 nt, Artificial Sequence
  Description of Artificial Sequence:  Target Sequence/siNA sense region
gacccugguggacaucuuccagg

SEQ ID NO: 2563 - RNA, 23 nt, Artificial Sequence
  Description of Artificial Sequence:  Target Sequence/siNA sense region
ucagagcggagaaagcauuuguu

SEQ ID NO: 2564 - RNA, 23 nt, Artificial Sequence
  Description of Artificial Sequence:  Target Sequence/siNA sense region
auccgcagacguguaaauguucc

SEQ ID NO: 2565 - RNA, 23 nt, Artificial Sequence
  Description of Artificial Sequence:  Target Sequence/siNA sense region
ccgcagacguguaaauguuccug

SEQ ID NO: 2566 - RNA, 23 nt, Artificial Sequence
  Description of Artificial Sequence:  Target Sequence/siNA sense region
cgcagacguguaaauguuccugc

SEQ ID NO: 2567 - RNA, 23 nt, Artificial Sequence
  Description of Artificial Sequence:  Target Sequence/siNA sense region
gacguguaaauguuccugcaaaa

SEQ ID NO: 2568 - RNA, 23 nt, Artificial Sequence
  Description of Artificial Sequence:  Target Sequence/siNA sense region
uaaauguuccugcaaaaacacag

SEQ ID NO: 2569 - RNA, 23 nt, Artificial Sequence
  Description of Artificial Sequence:  Target Sequence/siNA sense region
aaauguuccugcaaaaacacaga

SEQ ID NO: 2570 - RNA, 23 nt, Artificial Sequence
  Description of Artificial Sequence:  Target Sequence/siNA sense region
uccugcaaaaacacagacucgcg

SEQ ID NO: 2571 - RNA, 23 nt, Artificial Sequence
  Description of Artificial Sequence:  Target Sequence/siNA sense region
ccugcaaaaacacagacucgcgu

SEQ ID NO: 2572 - RNA, 23 nt, Artificial Sequence
  Description of Artificial Sequence:  Target Sequence/siNA sense region
aggcgaggcagcuugaguuaaac

SEQ ID NO: 2573 - RNA, 23 nt, Artificial Sequence
  Description of Artificial Sequence:  Target Sequence/siNA sense region
cgaggcagcuugaguuaaacgaa

SEQ ID NO: 2574 - RNA, 23 nt, Artificial Sequence
  Description of Artificial Sequence:  Target Sequence/siNA sense region
gaggcagcuugaguuaaacgaac

SEQ ID NO: 2575 - RNA, 23 nt, Artificial Sequence
  Description of Artificial Sequence:  Target Sequence/siNA sense region
aggcagcuugaguuaaacgaacg

SEQ ID NO: 2576 - RNA, 23 nt, Artificial Sequence
  Description of Artificial Sequence:  Target Sequence/siNA sense region
ggcagcuugaguuaaacgaacgu

SEQ ID NO: 2577 - RNA, 23 nt, Artificial Sequence
  Description of Artificial Sequence:  Target Sequence/siNA sense region
uaaacgaacguacuugcagaugu

SEQ ID NO: 2578 - RNA, 23 nt, Artificial Sequence
  Description of Artificial Sequence:  Target Sequence/siNA sense region
aaacgaacguacuugcagaugug

SEQ ID NO: 2579 - RNA, 23 nt, Artificial Sequence
  Description of Artificial Sequence:  Target Sequence/siNA sense region
aaaccucaccaaggccagcacau

SEQ ID NO: 2580 - RNA, 23 nt, Artificial Sequence
  Description of Artificial Sequence:  Target Sequence/siNA sense region
agagagacggggucagagagagc

SEQ ID NO: 2581 - RNA, 23 nt, Artificial Sequence
  Description of Artificial Sequence:  Target Sequence/siNA sense region
aaagcauuuguuuguacaagauc

SEQ ID NO: 2582 - RNA, 23 nt, Artificial Sequence
  Description of Artificial Sequence:  Target Sequence/siNA sense region
ucccucuucuuuuuucuuaaaca

SEQ ID NO: 2583 - RNA, 23 nt, Artificial Sequence
  Description of Artificial Sequence:  Target Sequence/siNA sense region
cccucuucuuuuuucuuaaacau

SEQ ID NO: 2584 - RNA, 23 nt, Artificial Sequence
  Description of Artificial Sequence:  Target Sequence/siNA sense region
ccucuucuuuuuucuuaaacauu

SEQ ID NO: 2585 - RNA, 23 nt, Artificial Sequence
  Description of Artificial Sequence:  Target Sequence/siNA sense region
ucuucuuuuuucuuaaacauuuu

SEQ ID NO: 2586 - RNA, 23 nt, Artificial Sequence
  Description of Artificial Sequence:  Target Sequence/siNA sense region
ucuuuuuucuuaaacauuuuuuu

SEQ ID NO: 2587 - RNA, 23 nt, Artificial Sequence
  Description of Artificial Sequence:  Target Sequence/siNA sense region
uuuuuucuuaaacauuuuuuuuu

SEQ ID NO: 2588 - RNA, 23 nt, Artificial Sequence
  Description of Artificial Sequence:  Target Sequence/siNA sense region
uuuuucuuaaacauuuuuuuuua

SEQ ID NO: 2589 - RNA, 23 nt, Artificial Sequence
  Description of Artificial Sequence:  Target Sequence/siNA sense region
aacauuuuuuuuuaaaacuguau

SEQ ID NO: 2590 - RNA, 23 nt, Artificial Sequence
  Description of Artificial Sequence:  Target Sequence/siNA sense region
uuuuuuuaaaacuguauuguuuc

SEQ ID NO: 2591 - RNA, 23 nt, Artificial Sequence
  Description of Artificial Sequence:  Target Sequence/siNA sense region
uuuuuuaaaacuguauuguuucu

SEQ ID NO: 2592 - RNA, 23 nt, Artificial Sequence
  Description of Artificial Sequence:  Target Sequence/siNA sense region
uuaaaacuguauuguuucucguu

SEQ ID NO: 2593 - RNA, 23 nt, Artificial Sequence
  Description of Artificial Sequence:  Target Sequence/siNA sense region
auuguuucucguuuuaauuuauu

SEQ ID NO: 2594 - RNA, 23 nt, Artificial Sequence
  Description of Artificial Sequence:  Target Sequence/siNA sense region
uuauuuuugcuugccauucccca

SEQ ID NO: 2595 - RNA, 23 nt, Artificial Sequence
  Description of Artificial Sequence:  Target Sequence/siNA sense region
uccccacuugaaucgggccgacg

SEQ ID NO: 2596 - RNA, 23 nt, Artificial Sequence
  Description of Artificial Sequence:  Target Sequence/siNA sense region
ccccacuugaaucgggccgacgg

SEQ ID NO: 2597 - RNA, 23 nt, Artificial Sequence
  Description of Artificial Sequence:  Target Sequence/siNA sense region
cuccagagagaagucgaggaaga

SEQ ID NO: 2598 - RNA, 23 nt, Artificial Sequence
  Description of Artificial Sequence:  Target Sequence/siNA sense region
uccagagagaagucgaggaagag

SEQ ID NO: 2599 - RNA, 23 nt, Artificial Sequence
  Description of Artificial Sequence:  Target Sequence/siNA sense region
gucagagagagcgcgcgggcgug

SEQ ID NO: 2600 - RNA, 23 nt, Artificial Sequence
  Description of Artificial Sequence:  Target Sequence/siNA sense region
gcagcugaccagucgcgcugacg

SEQ ID NO: 2601 - RNA, 23 nt, Artificial Sequence
  Description of Artificial Sequence:  Target Sequence/siNA sense region
ggccggagcccgcgcccggaggc

SEQ ID NO: 2602 - RNA, 23 nt, Artificial Sequence
  Description of Artificial Sequence:  Target Sequence/siNA sense region
gccggagcccgcgcccggaggcg

SEQ ID NO: 2603 - RNA, 23 nt, Artificial Sequence
  Description of Artificial Sequence:  Target Sequence/siNA sense region
ccggagcccgcgcccggaggcgg

SEQ ID NO: 2604 - RNA, 23 nt, Artificial Sequence
  Description of Artificial Sequence:  Target Sequence/siNA sense region
cacugaaacuuuucguccaacuu

SEQ ID NO: 2605 - RNA, 23 nt, Artificial Sequence
  Description of Artificial Sequence:  Target Sequence/siNA sense region
acugaaacuuuucguccaacuuc

SEQ ID NO: 2606 - RNA, 23 nt, Artificial Sequence
  Description of Artificial Sequence:  Target Sequence/siNA sense region
cugaaacuuuucguccaacuucu

SEQ ID NO: 2607 - RNA, 23 nt, Artificial Sequence
  Description of Artificial Sequence:  Target Sequence/siNA sense region
aacuuuucguccaacuucugggc

SEQ ID NO: 2608 - RNA, 23 nt, Artificial Sequence
  Description of Artificial Sequence:  Target Sequence/siNA sense region
cuucugggcuguucucgcuucgg

SEQ ID NO: 2609 - RNA, 23 nt, Artificial Sequence
  Description of Artificial Sequence:  Target Sequence/siNA sense region
ucugggcuguucucgcuucggag

SEQ ID NO: 2610 - RNA, 23 nt, Artificial Sequence
  Description of Artificial Sequence:  Target Sequence/siNA sense region
ucggaggagccgugguccgcgcg

SEQ ID NO: 2611 - RNA, 23 nt, Artificial Sequence
  Description of Artificial Sequence:  Target Sequence/siNA sense region
cggaggagccgugguccgcgcgg

SEQ ID NO: 2612 - RNA, 23 nt, Artificial Sequence
  Description of Artificial Sequence:  Target Sequence/siNA sense region
ccgggaggagccgcagccggagg

SEQ ID NO: 2613 - RNA, 23 nt, Artificial Sequence
  Description of Artificial Sequence:  Target Sequence/siNA sense region
cgggaggagccgcagccggagga

SEQ ID NO: 2614 - RNA, 23 nt, Artificial Sequence
  Description of Artificial Sequence:  Target Sequence/siNA sense region
gggaggagccgcagccggaggag

SEQ ID NO: 2615 - RNA, 23 nt, Artificial Sequence
  Description of Artificial Sequence:  Target Sequence/siNA sense region
gaagagaaggaagaggagagggg

SEQ ID NO: 2616 - RNA, 23 nt, Artificial Sequence
  Description of Artificial Sequence:  Target Sequence/siNA sense region
gugcuccagccgcgcgcgcuccc

SEQ ID NO: 2617 - RNA, 23 nt, Artificial Sequence
  Description of Artificial Sequence:  Target Sequence/siNA sense region
gccccacagcccgagccggagag

SEQ ID NO: 2618 - RNA, 23 nt, Artificial Sequence
  Description of Artificial Sequence:  Target Sequence/siNA sense region
ccccacagcccgagccggagagg

SEQ ID NO: 2619 - RNA, 23 nt, Artificial Sequence
  Description of Artificial Sequence:  Target Sequence/siNA sense region
accaugaacuuucugcugucuug

SEQ ID NO: 2620 - RNA, 23 nt, Artificial Sequence
  Description of Artificial Sequence:  Target Sequence/siNA sense region
gaacuuucugcugucuugggugc

SEQ ID NO: 2621 - RNA, 23 nt, Artificial Sequence
  Description of Artificial Sequence:  Target Sequence/siNA sense region
ucugcugucuugggugcauugga

SEQ ID NO: 2622 - RNA, 23 nt, Artificial Sequence
  Description of Artificial Sequence:  Target Sequence/siNA sense region
ggugcauuggagccuugccuugc

SEQ ID NO: 2623 - RNA, 23 nt, Artificial Sequence
  Description of Artificial Sequence:  Target Sequence/siNA sense region
gccuugccuugcugcucuaccuc

SEQ ID NO: 2624 - RNA, 23 nt, Artificial Sequence
  Description of Artificial Sequence:  Target Sequence/siNA sense region
ucaccuccaccaugccaaguggu

SEQ ID NO: 2625 - RNA, 23 nt, Artificial Sequence
  Description of Artificial Sequence:  Target Sequence/siNA sense region
cuccuccaccaugccaagugguc

SEQ ID NO: 2626 - RNA, 23 nt, Artificial Sequence
  Description of Artificial Sequence:  Target Sequence/siNA sense region
caccaugccaaguggucccaggc

SEQ ID NO: 2627 - RNA, 23 nt, Artificial Sequence
  Description of Artificial Sequence:  Target Sequence/siNA sense region
ucccaggcugcacccauggcaga

SEQ ID NO: 2628 - RNA, 23 nt, Artificial Sequence
  Description of Artificial Sequence:  Target Sequence/siNA sense region
auucuaucagcgcagcuacugcc

SEQ ID NO: 2629 - RNA, 23 nt, Artificial Sequence
  Description of Artificial Sequence:  Target Sequence/siNA sense region
caucuuccaggaguacccugaug

SEQ ID NO: 2630 - RNA, 23 nt, Artificial Sequence
  Description of Artificial Sequence:  Target Sequence/siNA sense region
caucuucaagccauccugugugc

SEQ ID NO: 2631 - RNA, 23 nt, Artificial Sequence
  Description of Artificial Sequence:  Target Sequence/siNA sense region
cuaaugacgagggccuggagugu

SEQ ID NO: 2632 - RNA, 23 nt, Artificial Sequence
  Description of Artificial Sequence:  Target Sequence/siNA sense region
cgggccuggagugugugcccacu

SEQ ID NO: 2633 - RNA, 23 nt, Artificial Sequence
  Description of Artificial Sequence:  Target Sequence/siNA sense region
cccacugaggaguccaacaucac

SEQ ID NO: 2634 - RNA, 23 nt, Artificial Sequence
  Description of Artificial Sequence:  Target Sequence/siNA sense region
uccaacaucaccaugcagauuau

SEQ ID NO: 2635 - RNA, 23 nt, Artificial Sequence
  Description of Artificial Sequence:  Target Sequence/siNA sense region
acaucaccaugcagauuaugcgg

SEQ ID NO: 2636 - RNA, 23 nt, Artificial Sequence
  Description of Artificial Sequence:  Target Sequence/siNA sense region
ugcagauuaugcggaucaaaccu

SEQ ID NO: 2637 - RNA, 23 nt, Artificial Sequence
  Description of Artificial Sequence:  Target Sequence/siNA sense region
gcagauuaugcggaucaaaccuc

SEQ ID NO: 2638 - RNA, 23 nt, Artificial Sequence
  Description of Artificial Sequence:  Target Sequence/siNA sense region
cagauuaugcggaucaaaccuca

SEQ ID NO: 2639 - RNA, 23 nt, Artificial Sequence
  Description of Artificial Sequence:  Target Sequence/siNA sense region
auaggagagaugagcuuccuaca

SEQ ID NO: 2640 - RNA, 23 nt, Artificial Sequence
  Description of Artificial Sequence:  Target Sequence/siNA sense region
gagagcuuccuacagcacaacaa

SEQ ID NO: 2641 - RNA, 23 nt, Artificial Sequence
  Description of Artificial Sequence:  Target Sequence/siNA sense region
agcuuccuacagcacaacaaaug

SEQ ID NO: 2642 - RNA, 23 nt, Artificial Sequence
  Description of Artificial Sequence:  Target Sequence/siNA sense region
ccacagcacaacaaaugugaaug

SEQ ID NO: 2643 - RNA, 23 nt, Artificial Sequence
  Description of Artificial Sequence:  Target Sequence/siNA sense region
uacagcacaacaaaugugaaugc

SEQ ID NO: 2644 - RNA, 23 nt, Artificial Sequence
  Description of Artificial Sequence:  Target Sequence/siNA sense region
acaaaugugaaugcagaccaaag

SEQ ID NO: 2645 - RNA, 23 nt, Artificial Sequence
  Description of Artificial Sequence:  Target Sequence/siNA sense region
uaccuccaccaugccaagugguc

SEQ ID NO: 2646 - RNA, 23 nt, Artificial Sequence
  Description of Artificial Sequence:  Target Sequence/siNA sense region
accuccaccaugccaaguggucc

SEQ ID NO: 2647 - RNA, 23 nt, Artificial Sequence
  Description of Artificial Sequence:  Target Sequence/siNA sense region
accaugccaaguggucccaggcu

SEQ ID NO: 2648 - RNA, 23 nt, Artificial Sequence
  Description of Artificial Sequence:  Target Sequence/siNA sense region
ccaugccaaguggucccaggcug

SEQ ID NO: 2649 - RNA, 23 nt, Artificial Sequence
  Description of Artificial Sequence:  Target Sequence/siNA sense region
caugccaaguggucccaggcugc

SEQ ID NO: 2650 - RNA, 23 nt, Artificial Sequence
  Description of Artificial Sequence:  Target Sequence/siNA sense region
augccaaguggucccaggcugca

SEQ ID NO: 2651 - RNA, 23 nt, Artificial Sequence
  Description of Artificial Sequence:  Target Sequence/siNA sense region
ugccaaguggucccaggcugcac

SEQ ID NO: 2652 - RNA, 23 nt, Artificial Sequence
  Description of Artificial Sequence:  Target Sequence/siNA sense region
aaguggucccaggcugcacccau

SEQ ID NO: 2653 - RNA, 23 nt, Artificial Sequence
  Description of Artificial Sequence:  Target Sequence/siNA sense region
aguggucccaggcugcacccaug

SEQ ID NO: 2654 - RNA, 23 nt, Artificial Sequence
  Description of Artificial Sequence:  Target Sequence/siNA sense region
ugaaugcagaccaaagaaagaua

SEQ ID NO: 2655 - RNA, 23 nt, Artificial Sequence
  Description of Artificial Sequence:  Target Sequence/siNA sense region
gcucagagcggagaaagcauuug

SEQ ID NO: 2656 - RNA, 23 nt, Artificial Sequence
  Description of Artificial Sequence:  Target Sequence/siNA sense region
aauguuccugcaaaaacacagac

SEQ ID NO: 2657 - RNA, 23 nt, Artificial Sequence
  Description of Artificial Sequence:  Target Sequence/siNA sense region
auguuccugcaaaaacacagacu

SEQ ID NO: 2658 - RNA, 23 nt, Artificial Sequence
  Description of Artificial Sequence:  Target Sequence/siNA sense region
uguuccugcaaaaacacagacuc

SEQ ID NO: 2659 - RNA, 23 nt, Artificial Sequence
  Description of Artificial Sequence:  Target Sequence/siNA sense region
guuccugcaaaaacacagacucg

SEQ ID NO: 2660 - RNA, 23 nt, Artificial Sequence
  Description of Artificial Sequence:  Target Sequence/siNA sense region
ugcaaaaacacagacucgcguug

SEQ ID NO: 2661 - RNA, 23 nt, Artificial Sequence
  Description of Artificial Sequence:  Target Sequence/siNA sense region
aaaaacacagacucgcguugcaa

SEQ ID NO: 2662 - RNA, 23 nt, Artificial Sequence
  Description of Artificial Sequence:  Target Sequence/siNA sense region
acacagacucgcguugcaaggcg

SEQ ID NO: 2663 - RNA, 23 nt, Artificial Sequence
  Description of Artificial Sequence:  Target Sequence/siNA sense region
agacucgcguugcaaggcgaggc

SEQ ID NO: 2664 - RNA, 23 nt, Artificial Sequence
  Description of Artificial Sequence:  Target Sequence/siNA sense region
gcguugcaaggcgaggcagcuug

SEQ ID NO: 2665 - RNA, 23 nt, Artificial Sequence
  Description of Artificial Sequence:  Target Sequence/siNA sense region
ugcaaggcgaggcagcuugaguu

SEQ ID NO: 2666 - RNA, 23 nt, Artificial Sequence
  Description of Artificial Sequence:  Target Sequence/siNA sense region
caaggcgaggcagcuugaguuaa

SEQ ID NO: 2667 - RNA, 23 nt, Artificial Sequence
  Description of Artificial Sequence:  Target Sequence/siNA sense region
ugaguuaaacgaacguacuugca

SEQ ID NO: 2668 - RNA, 23 nt, Artificial Sequence
  Description of Artificial Sequence:  Target Sequence/siNA sense region
aguuaaacgaacguacuugcaga

SEQ ID NO: 2669 - RNA, 23 nt, Artificial Sequence
  Description of Artificial Sequence:  Target Sequence/siNA sense region
guuaaacgaacguacuugcagau

SEQ ID NO: 2670 - RNA, 23 nt, Artificial Sequence
  Description of Artificial Sequence:  Target Sequence/siNA sense region
uuaaacgaacguacuugcagaug

SEQ ID NO: 2671 - RNA, 23 nt, Artificial Sequence
  Description of Artificial Sequence:  Target Sequence/siNA sense region
acguacuugcagaugugacaagc

SEQ ID NO: 2672 - RNA, 23 nt, Artificial Sequence
  Description of Artificial Sequence:  Target Sequence/siNA sense region
guacuugcagaugugacaagccg

SEQ ID NO: 2673 - RNA, 46 nt, Artificial Sequence
  Description of Artificial Sequence:  Target Sequence/siNA sense region
accucacugccacucuaauugucccucacugccacucuaauuguca

SEQ ID NO: 2674 - RNA, 46 nt, Artificial Sequence
  Description of Artificial Sequence:  Target Sequence/siNA sense region
ccucacugccacucuaauugucaccucacugccacucuaauuguca

SEQ ID NO: 2675 - RNA, 46 nt, Artificial Sequence
  Description of Artificial Sequence:  Target Sequence/siNA sense region
cucacugccacucuaauugucaaccucacugccacucuaauuguca

SEQ ID NO: 2676 - RNA, 46 nt, Artificial Sequence
  Description of Artificial Sequence:  Target Sequence/siNA sense region
aaagcauuuguuuguacaagaucucaugcuggacugcuggcacaga

SEQ ID NO: 2677 - RNA, 46 nt, Artificial Sequence
  Description of Artificial Sequence:  Target Sequence/siNA sense region
agagagacggggucagagagagcaagaccccgucucuauaccaacc

SEQ ID NO: 2678 - RNA, 46 nt, Artificial Sequence
  Description of Artificial Sequence:  Target Sequence/siNA sense region
accucacugccacucuaauugucucagaguggcagugagcaaaggg

SEQ ID NO: 2679 - RNA, 46 nt, Artificial Sequence
  Description of Artificial Sequence:  Target Sequence/siNA sense region
ccucacugccacucuaauugucaucagaguggcagugagcaaaggg

SEQ ID NO: 2680 - RNA, 46 nt, Artificial Sequence
  Description of Artificial Sequence:  Target Sequence/siNA sense region
cucacugccacucuaauugucaaucagaguggcagugagcaaaggg

SEQ ID NO: 2681 - RNA, 46 nt, Artificial Sequence
  Description of Artificial Sequence:  Target Sequence/siNA sense region
aaugugaaugcagaccaaagaaaucaugcuggacugcuggcacaga

SEQ ID NO: 2682 - RNA, 46 nt, Artificial Sequence
  Description of Artificial Sequence:  Target Sequence/siNA sense region
augugaaugcagaccaaagaaagucaugcuggacugcuggcacaga

SEQ ID NO: 2683 - RNA, 46 nt, Artificial Sequence
  Description of Artificial Sequence:  Target Sequence/siNA sense region
guggacaucuuccaggaguaccccugaacugaguuuaaaaggcacc

SEQ ID NO: 2684 - RNA, 46 nt, Artificial Sequence
  Description of Artificial Sequence:  Target Sequence/siNA sense region
augugaaugcagaccaaagaaagcugaacugaguuuaaaaggcacc

SEQ ID NO: 2685 - RNA, 46 nt, Artificial Sequence
  Description of Artificial Sequence:  Target Sequence/siNA sense region
uuugagcauggaagaggauucugcugaacugaguuuaaaaggcacc

SEQ ID NO: 2686 - RNA, 46 nt, Artificial Sequence
  Description of Artificial Sequence:  Target Sequence/siNA sense region
cugaacugaguuuaaaaggcaccaugugaaugcagaccaaagaaag

SEQ ID NO: 2687 - RNA, 46 nt, Artificial Sequence
  Description of Artificial Sequence:  Target Sequence/siNA sense region
ucaugcuggacugcuggcacagaaugugaaugcagaccaaagaaag

SEQ ID NO: 2688 - RNA, 46 nt, Artificial Sequence
  Description of Artificial Sequence:  Target Sequence/siNA sense region
ucccucuucuuuuuucuuaaacaagaagaagaggaagcuccugaag

SEQ ID NO: 2689 - RNA, 46 nt, Artificial Sequence
  Description of Artificial Sequence:  Target Sequence/siNA sense region
ccucuucuuuuuucuuaaacauuucaaagaagaaggaaacagaauc

SEQ ID NO: 2690 - RNA, 46 nt, Artificial Sequence
  Description of Artificial Sequence:  Target Sequence/siNA sense region
auuguuucucguuuuaauuuauuagcgagaaacauucuuuuaucug

SEQ ID NO: 2691 - RNA, 46 nt, Artificial Sequence
  Description of Artificial Sequence:  Target Sequence/siNA sense region
uccccacuugaaucgggccgacggaucaagugggccuuggaucgcu

SEQ ID NO: 2692 - RNA, 46 nt, Artificial Sequence
  Description of Artificial Sequence:  Target Sequence/siNA sense region
ccccacuugaaucgggccgacgguuuucaaguggccagaggcaugg

SEQ ID NO: 2693 - RNA, 46 nt, Artificial Sequence
  Description of Artificial Sequence:  Target Sequence/siNA sense region
cuccagagagaagucgaggaagaggucucucugguuguguaugucc

SEQ ID NO: 2694 - RNA, 46 nt, Artificial Sequence
  Description of Artificial Sequence:  Target Sequence/siNA sense region
agagagacggggucagagagagcagaccccgucucuauaccaacca

SEQ ID NO: 2695 - RNA, 46 nt, Artificial Sequence
  Description of Artificial Sequence:  Target Sequence/siNA sense region
gcagcugaccagucgcgcugacgcauggucagcuacugggacaccg

SEQ ID NO: 2696 - RNA, 46 nt, Artificial Sequence
  Description of Artificial Sequence:  Target Sequence/siNA sense region
cugaaacuuuucguccaacuucuaaaaaaguuuccacuugacacuu

SEQ ID NO: 2697 - RNA, 46 nt, Artificial Sequence
  Description of Artificial Sequence:  Target Sequence/siNA sense region
ccccacagcccgagccggagagguugcugugggaaaucuucuccuu

SEQ ID NO: 2698 - RNA, 46 nt, Artificial Sequence
  Description of Artificial Sequence:  Target Sequence/siNA sense region
accaugaacuuucugcugucuugucaaguucaugagccuggaaaga

SEQ ID NO: 2699 - RNA, 46 nt, Artificial Sequence
  Description of Artificial Sequence:  Target Sequence/siNA sense region
caccaugccaaguggucccaggcagggcauggaguucuuggcaucg

SEQ ID NO: 2700 - RNA, 46 nt, Artificial Sequence
  Description of Artificial Sequence:  Target Sequence/siNA sense region
caucuucaagccauccugugugcuguugaagaugggaaggauuugc

SEQ ID NO: 2701 - RNA, 46 nt, Artificial Sequence
  Description of Artificial Sequence:  Target Sequence/siNA sense region
ugcagauuaugcggaucaaaccuaacgcauaaucugggacaguaga

SEQ ID NO: 2702 - RNA, 46 nt, Artificial Sequence
  Description of Artificial Sequence:  Target Sequence/siNA sense region
gcagauuaugcggaucaaaccucaacgcauaaucugggacaguaga

SEQ ID NO: 2703 - RNA, 46 nt, Artificial Sequence
  Description of Artificial Sequence:  Target Sequence/siNA sense region
auaggagagaugagcuuccuacauaaucucuccuguggauuccuac

SEQ ID NO: 2704 - RNA, 46 nt, Artificial Sequence
  Description of Artificial Sequence:  Target Sequence/siNA sense region
agcuuccuacagcacaacaaaugucaggaagcucugaugaugucag

SEQ ID NO: 2705 - RNA, 46 nt, Artificial Sequence
  Description of Artificial Sequence:  Target Sequence/siNA sense region
uacagcacaacaaaugugaaugcucguugugcuguuucugacuccu

SEQ ID NO: 2706 - RNA, 46 nt, Artificial Sequence
  Description of Artificial Sequence:  Target Sequence/siNA sense region
acaaaugugaaugcagaccaaagcuauucacauuuuguaucaguau

SEQ ID NO: 2707 - RNA, 24 nt, Artificial Sequence
  Description of Artificial Sequence:  Target Sequence/siNA sense region
aguuuaaaaggcacccagcacauc

SEQ ID NO: 2708 - RNA, 23 nt, Artificial Sequence
  Description of Artificial Sequence:  Target Sequence/siNA sense region
gcauauauaugauaaagcauuca

SEQ ID NO: 2709 - RNA, 21 nt, Artificial Sequence
  Description of Artificial Sequence:  siNA sense region
  misc_feature (20)..(21): n stands for thymidine
ugucugcuucucacaggaunn

SEQ ID NO: 2710 - RNA, 21 nt, Artificial Sequence
  Description of Artificial Sequence:  siNA sense region
  misc_feature (20)..(21): n stands for thymidine
aggagaggaccugaaacugnn

SEQ ID NO: 2711 - RNA, 21 nt, Artificial Sequence
  Description of Artificial Sequence:  siNA sense region
  misc_feature (20)..(21): n stands for thymidine
ggagaggaccugaaacugunn

SEQ ID NO: 2712 - RNA, 21 nt, Artificial Sequence
  Description of Artificial Sequence:  siNA sense region
  misc_feature (20)..(21): n stands for thymidine
auuuggcauuaagaaaucann

SEQ ID NO: 2713 - RNA, 21 nt, Artificial Sequence
  Description of Artificial Sequence:  siNA antisense region
  misc_feature (20)..(21): n stands for thymidine
auccugugagaagcagacann

SEQ ID NO: 2714 - RNA, 21 nt, Artificial Sequence
  Description of Artificial Sequence:  siNA antisense region
  misc_feature (20)..(21): n stands for thymidine
caguuucagguccucuccunn

SEQ ID NO: 2715 - RNA, 21 nt, Artificial Sequence
  Description of Artificial Sequence:  siNA antisense region
  misc_feature (20)..(21): n stands for thymidine
acaguuucagguccucuccnn

SEQ ID NO: 2716 - RNA, 21 nt, Artificial Sequence
  Description of Artificial Sequence:  siNA antisense region
  misc_feature (20)..(21): n stands for thymidine
ugauuucuuaaugccaaaunn

SEQ ID NO: 2717 - RNA, 21 nt, Artificial Sequence
  Description of Artificial Sequence:  siNA sense region
  misc_feature (1)..(1): 2'-deoxy-2'-fluoro
  misc_feature (1)..(1): 5'-3 attached terminal deoxyabasic moeity
  misc_feature (3)..(5): 2'-deoxy-2'-fluoro
  misc_feature (7)..(12): 2'-deoxy-2'-fluoro
  misc_feature (14)..(14): 2'-deoxy-2'-fluoro
  misc_feature (19)..(19): 2'-deoxy-2'-fluoro
  misc_feature (20)..(21): n stands for thymidine
  misc_feature (21)..(21): 3'-3 attached terminal deoxyabasic moeity
ugucugcuucucacaggaunn

SEQ ID NO: 2718 - RNA, 21 nt, Artificial Sequence
  Description of Artificial Sequence:  siNA sense region
  misc_feature (1)..(1): 5'-3 attached terminal deoxyabasic moeity
  misc_feature (10)..(12): 2'-deoxy-2'-fluoro
  misc_feature (17)..(18): 2'-deoxy-2'-fluoro
  misc_feature (20)..(21): n stands for thymidine
  misc_feature (21)..(21): 3'-3 attached terminal deoxyabasic moeity
aggagaggaccugaaacugnn

SEQ ID NO: 2719 - RNA, 21 nt, Artificial Sequence
  Description of Artificial Sequence:  siNA sense region
  misc_feature (1)..(1): 5'-3 attached terminal deoxyabasic moeity
  misc_feature (9)..(11): 2'-deoxy-2'-fluoro
  misc_feature (16)..(17): 2'-deoxy-2'-fluoro
  misc_feature (19)..(19): 2'-deoxy-2'-fluoro
  misc_feature (20)..(21): n stands for thymidine
  misc_feature (21)..(21): 3'-3 attached terminal deoxyabasic moeity
ggagaggaccugaaacugunn

SEQ ID NO: 2720 - RNA, 21 nt, Artificial Sequence
  Description of Artificial Sequence:  siNA sense region
  misc_feature (1)..(1): 5'-3 attached terminal deoxyabasic moeity
  misc_feature (2)..(4): 2'-deoxy-2'-fluoro
  misc_feature (7)..(7): 2'-deoxy-2'-fluoro
  misc_feature (9)..(10): 2'-deoxy-2'-fluoro
  misc_feature (17)..(18): 2'-deoxy-2'-fluoro
  misc_feature (20)..(21): n stands for thymidine
  misc_feature (21)..(21): 3'-3 attached terminal deoxyabasic moeity
auuuggcauuaagaaaucann

SEQ ID NO: 2721 - RNA, 21 nt, Artificial Sequence
  Description of Artificial Sequence:  siNA antisense region
  misc_feature (2)..(5): 2'-deoxy-2'-fluoro
  misc_feature (7)..(7): 2'-deoxy-2'-fluoro
  misc_feature (14)..(14): 2'-deoxy-2'-fluoro
  misc_feature (18)..(18): 2'-deoxy-2'-fluoro
  misc_feature (20)..(21): n stands for thymidine
  misc_feature (20)..(20): Phosphorothioate 3'-Internucleotide Linkage
auccugugagaagcagacann

SEQ ID NO: 2722 - RNA, 21 nt, Artificial Sequence
  Description of Artificial Sequence:  siNA antisense region
  misc_feature (1)..(1): 2'-deoxy-2'-fluoro
  misc_feature (4)..(7): 2'-deoxy-2'-fluoro
  misc_feature (11)..(19): 2'-deoxy-2'-fluoro
  misc_feature (20)..(21): n stands for thymidine
  misc_feature (20)..(20): Phosphorothioate 3'-Internucleotide Linkage
caguuucagguccucuccunn

SEQ ID NO: 2723 - RNA, 21 nt, Artificial Sequence
  Description of Artificial Sequence:  siNA antisense region
  misc_feature (2)..(2): 2'-deoxy-2'-fluoro
  misc_feature (5)..(8): 2'-deoxy-2'-fluoro
  misc_feature (12)..(19): 2'-deoxy-2'-fluoro
  misc_feature (20)..(21): n stands for thymidine
  misc_feature (20)..(20): Phosphorothioate 3'-Internucleotide Linkage
acaguuucagguccucuccnn

SEQ ID NO: 2724 - RNA, 21 nt, Artificial Sequence
  Description of Artificial Sequence:  siNA antisense region
  misc_feature (1)..(1): 2'-deoxy-2'-fluoro
  misc_feature (4)..(9): 2'-deoxy-2'-fluoro
  misc_feature (12)..(12): 2'-deoxy-2'-fluoro
  misc_feature (14)..(15): 2'-deoxy-2'-fluoro
  misc_feature (19)..(19): 2'-deoxy-2'-fluoro
  misc_feature (20)..(21): n stands for thymidine
  misc_feature (20)..(20): Phosphorothioate 3'-Internucleotide Linkage
ugauuucuuaaugccaaaunn

SEQ ID NO: 2725 - RNA, 21 nt, Artificial Sequence
  Description of Artificial Sequence:  siNA sense region
  misc_feature (1)..(1): 2'-deoxy-2'-fluoro
  misc_feature (1)..(1): 5'-3 attached terminal deoxyabasic moeity
  misc_feature (2)..(2): 2'-deoxy
  misc_feature (3)..(5): 2'-deoxy-2'-fluoro
  misc_feature (6)..(6): 2'-deoxy
  misc_feature (7)..(12): 2'-deoxy-2'-fluoro
  misc_feature (13)..(13): 2'-deoxy
  misc_feature (14)..(14): 2'-deoxy-2'-fluoro
  misc_feature (15)..(18): 2'-deoxy
  misc_feature (19)..(19): 2'-deoxy-2'-fluoro
  misc_feature (20)..(21): n stands for thymidine
  misc_feature (21)..(21): 3'-3 attached terminal deoxyabasic moeity
ugucugcuucucacaggaunn

SEQ ID NO: 2726 - RNA, 21 nt, Artificial Sequence
  Description of Artificial Sequence:  siNA sense region
  misc_feature (1)..(9): 2'-deoxy
  misc_feature (1)..(1): 5'-3 attached terminal deoxyabasic moeity
  misc_feature (10)..(12): 2'-deoxy-2'-fluoro
  misc_feature (13)..(16): 2'-deoxy
  misc_feature (17)..(18): 2'-deoxy-2'-fluoro
  misc_feature (19)..(19): 2'-deoxy
  misc_feature (20)..(21): n stands for thymidine
  misc_feature (21)..(21): 3'-3 attached terminal deoxyabasic moeity
aggagaggaccugaaacugnn

SEQ ID NO: 2727 - RNA, 21 nt, Artificial Sequence
  Description of Artificial Sequence:  siNA sense region
  misc_feature (1)..(8): 2'-deoxy
  misc_feature (1)..(1): 5'-3 attached terminal deoxyabasic moeity
  misc_feature (9)..(11): 2'-deoxy-2'-fluoro
  misc_feature (12)..(15): 2'-deoxy
  misc_feature (16)..(17): 2'-deoxy-2'-fluoro
  misc_feature (18)..(18): 2'-deoxy
  misc_feature (19)..(19): 2'-deoxy-2'-fluoro
  misc_feature (20)..(21): n stands for thymidine
  misc_feature (21)..(21): 3'-3 attached terminal deoxyabasic moeity
ggagaggaccugaaacugunn

SEQ ID NO: 2728 - RNA, 21 nt, Artificial Sequence
  Description of Artificial Sequence:  siNA sense region
  misc_feature (1)..(1): 2'-deoxy
  misc_feature (1)..(1): 5'-3 attached terminal deoxyabasic moeity
  misc_feature (2)..(4): 2'-deoxy-2'-fluoro
  misc_feature (5)..(6): 2'-deoxy
  misc_feature (7)..(7): 2'-deoxy-2'-fluoro
  misc_feature (8)..(8): 2'-deoxy
  misc_feature (9)..(10): 2'-deoxy-2'-fluoro
  misc_feature (11)..(16): 2'-deoxy
  misc_feature (17)..(18): 2'-deoxy-2'-fluoro
  misc_feature (19)..(19): 2'-deoxy
  misc_feature (20)..(21): n stands for thymidine
  misc_feature (21)..(21): 3'-3 attached terminal deoxyabasic moeity
auuuggcauuaagaaaucann

SEQ ID NO: 2729 - RNA, 21 nt, Artificial Sequence
  Description of Artificial Sequence:  siNA antisense region
  misc_feature (1)..(1): 2'-deoxy
  misc_feature (2)..(5): 2'-deoxy-2'-fluoro
  misc_feature (6)..(6): 2'-deoxy
  misc_feature (7)..(7): 2'-deoxy-2'-fluoro
  misc_feature (8)..(13): 2'-deoxy
  misc_feature (14)..(14): 2'-deoxy-2'-fluoro
  misc_feature (15)..(17): 2'-deoxy
  misc_feature (18)..(18): 2'-deoxy-2'-fluoro
  misc_feature (19)..(19): 2'-deoxy
  misc_feature (20)..(21): n stands for thymidine
  misc_feature (20)..(20): Phosphorothioate 3'-Internucleotide Linkage
auccugugagaagcagacann

SEQ ID NO: 2730 - RNA, 21 nt, Artificial Sequence
  Description of Artificial Sequence:  siNA antisense region
  misc_feature (1)..(1): 2'-deoxy-2'-fluoro
  misc_feature (2)..(3): 2'-deoxy
  misc_feature (4)..(7): 2'-deoxy-2'-fluoro
  misc_feature (8)..(10): 2'-deoxy
  misc_feature (11)..(19): 2'-deoxy-2'-fluoro
  misc_feature (20)..(21): n stands for thymidine
  misc_feature (20)..(20): Phosphorothioate 3'-Internucleotide Linkage
caguuucagguccucuccunn

SEQ ID NO: 2731 - RNA, 21 nt, Artificial Sequence
  Description of Artificial Sequence:  siNA antisense region
  misc_feature (1)..(1): 2'-deoxy
  misc_feature (2)..(2): 2'-deoxy-2'-fluoro
  misc_feature (3)..(4): 2'-deoxy
  misc_feature (5)..(8): 2'-deoxy-2'-fluoro
  misc_feature (9)..(11): 2'-deoxy
  misc_feature (12)..(19): 2'-deoxy-2'-fluoro
  misc_feature (20)..(21): n stands for thymidine
  misc_feature (20)..(20): Phosphorothioate 3'-Internucleotide Linkage
acaguuucagguccucuccnn

SEQ ID NO: 2732 - RNA, 21 nt, Artificial Sequence
  Description of Artificial Sequence:  siNA antisense region
  misc_feature (1)..(1): 2'-deoxy-2'-fluoro
  misc_feature (2)..(3): 2'-deoxy
  misc_feature (4)..(9): 2'-deoxy-2'-fluoro
  misc_feature (10)..(11): 2'-deoxy
  misc_feature (12)..(12): 2'-deoxy-2'-fluoro
  misc_feature (13)..(13): 2'-deoxy
  misc_feature (14)..(15): 2'-deoxy-2'-fluoro
  misc_feature (16)..(18): 2'-deoxy
  misc_feature (19)..(19): 2'-deoxy-2'-fluoro
  misc_feature (20)..(21): n stands for thymidine
  misc_feature (20)..(20): Phosphorothioate 3'-Internucleotide Linkage
ugauuucuuaaugccaaaunn

SEQ ID NO: 2733 - RNA, 21 nt, Artificial Sequence
  Description of Artificial Sequence:  inverted control/siNA sense
  misc_feature (3)..(5): 2'-deoxy-2'-fluoro
  misc_feature (9)..(14): 2'-deoxy-2'-fluoro
  misc_feature (16)..(16): 2'-deoxy-2'-fluoro
  misc_feature (20)..(21): n stands for thymidine
  misc_feature (20)..(20): Phosphorothioate 3'-Internucleotide Linkage
gacucaaauuuuccgugggnn

SEQ ID NO: 2734 - RNA, 21 nt, Artificial Sequence
  Description of Artificial Sequence:  inverted control/siNA sense
  misc_feature (1)..(1): 2'-deoxy-2'-fluoro
  misc_feature (3)..(10): 2'-deoxy-2'-fluoro
  misc_feature (16)..(17): 2'-deoxy-2'-fluoro
  misc_feature (19)..(19): 2'-deoxy-2'-fluoro
  misc_feature (20)..(21): n stands for thymidine
  misc_feature (20)..(20): Phosphorothioate 3'-Internucleotide Linkage
cguuccucccggagacuacnn

SEQ ID NO: 2735 - RNA, 21 nt, Artificial Sequence
  Description of Artificial Sequence:  inverted control/siNA sense
  misc_feature (4)..(11): 2'-deoxy-2'-fluoro
  misc_feature (14)..(17): 2'-deoxy-2'-fluoro
  misc_feature (20)..(21): n stands for thymidine
  misc_feature (20)..(20): Phosphorothioate 3'-Internucleotide Linkage
ggaccuuucuuaguuuuggnn

SEQ ID NO: 2736 - RNA, 21 nt, Artificial Sequence
  Description of Artificial Sequence:  inverted control/siNA sense
  misc_feature (1)..(3): 2'-deoxy-2'-fluoro
  misc_feature (1)..(1): 5'-3 attached terminal deoxyabasic moeity
  misc_feature (4)..(4): 2'-deoxy
  misc_feature (5)..(5): 2'-deoxy-2'-fluoro
  misc_feature (6)..(11): 2'-deoxy
  misc_feature (12)..(14): 2'-deoxy-2'-fluoro
  misc_feature (15)..(17): 2'-deoxy
  misc_feature (18)..(19): 2'-deoxy-2'-fluoro
  misc_feature (20)..(21): n stands for thymidine
  misc_feature (21)..(21): 3'-3 attached terminal deoxyabasic moeity
cccacggaaaauuugagucnn

SEQ ID NO: 2737 - RNA, 21 nt, Artificial Sequence
  Description of Artificial Sequence:  inverted control/siNA sense
  misc_feature (1)..(1): 2'-deoxy
  misc_feature (1)..(1): 5'-3 attached terminal deoxyabasic moeity
  misc_feature (2)..(2): 2'-deoxy-2'-fluoro
  misc_feature (3)..(4): 2'-deoxy
  misc_feature (5)..(9): 2'-deoxy-2'-fluoro
  misc_feature (10)..(17): 2'-deoxy
  misc_feature (18)..(18): 2'-deoxy-2'-fluoro
  misc_feature (19)..(19): 2'-deoxy
  misc_feature (20)..(21): n stands for thymidine
  misc_feature (21)..(21): 3'-3 attached terminal deoxyabasic moeity
guagucuccgggaggaacgnn

SEQ ID NO: 2738 - RNA, 21 nt, Artificial Sequence
  Description of Artificial Sequence:  inverted control/siNA sense
  misc_feature (1)..(2): 2'-deoxy-2'-fluoro
  misc_feature (1)..(1): 5'-3 attached terminal deoxyabasic moeity
  misc_feature (3)..(6): 2'-deoxy
  misc_feature (7)..(8): 2'-deoxy-2'-fluoro
  misc_feature (9)..(16): 2'-deoxy
  misc_feature (17)..(19): 2'-deoxy-2'-fluoro
  misc_feature (20)..(21): n stands for thymidine
  misc_feature (21)..(21): 3'-3 attached terminal deoxyabasic moeity
ccaaaacuaagaaagguccnn

SEQ ID NO: 2739 - RNA, 21 nt, Artificial Sequence
  Description of Artificial Sequence:  inverted control/siNA sense
  misc_feature (3)..(5): 2'-deoxy-2'-fluoro
  misc_feature (9)..(14): 2'-deoxy-2'-fluoro
  misc_feature (16)..(16): 2'-deoxy-2'-fluoro
  misc_feature (20)..(21): n stands for thymidine
  misc_feature (20)..(20): Phosphorothioate 3'-Internucleotide Linkage
gacucaaauuuuccgugggnn

SEQ ID NO: 2740 - RNA, 21 nt, Artificial Sequence
  Description of Artificial Sequence:  inverted control/siNA sense
  misc_feature (1)..(1): 2'-deoxy-2'-fluoro
  misc_feature (3)..(10): 2'-deoxy-2'-fluoro
  misc_feature (16)..(17): 2'-deoxy-2'-fluoro
  misc_feature (19)..(19): 2'-deoxy-2'-fluoro
  misc_feature (20)..(21): n stands for thymidine
  misc_feature (20)..(20): Phosphorothioate 3'-Internucleotide Linkage
cguuccucccggagacuacnn

SEQ ID NO: 2741 - RNA, 21 nt, Artificial Sequence
  Description of Artificial Sequence:  inverted control/siNA sense
  misc_feature (4)..(11): 2'-deoxy-2'-fluoro
  misc_feature (14)..(17): 2'-deoxy-2'-fluoro
  misc_feature (20)..(21): n stands for thymidine
  misc_feature (20)..(20): Phosphorothioate 3'-Internucleotide Linkage
ggaccuuucuuaguuuuggnn

SEQ ID NO: 2742 - RNA, 21 nt, Artificial Sequence
  Description of Artificial Sequence:  siNA sense region
  misc_feature (1)..(1): 5'-3 attached terminal deoxyabasic moeity
  misc_feature (21)..(21): 3'-3 attached terminal deoxyabasic moeity
  misc_feature (20)..(21): n stands for thymidine
cugaguuuaaaaggcacccnn

SEQ ID NO: 2743 - RNA, 21 nt, Artificial Sequence
  Description of Artificial Sequence:  siNA sense region
  misc_feature (1)..(1): 5'-3 attached terminal deoxyabasic moeity
  misc_feature (21)..(21): 3'-3 attached terminal deoxyabasic moeity
  misc_feature (20)..(21): n stands for thymidine
gcaaggagggccucugaugnn

SEQ ID NO: 2744 - RNA, 21 nt, Artificial Sequence
  Description of Artificial Sequence:  siNA sense region
  misc_feature (1)..(1): 5'-3 attached terminal deoxyabasic moeity
  misc_feature (21)..(21): 3'-3 attached terminal deoxyabasic moeity
  misc_feature (20)..(21): n stands for thymidine
ccuggaaagaaucaaaaccnn

SEQ ID NO: 2745 - RNA, 21 nt, Artificial Sequence
  Description of Artificial Sequence:  siNA antisense region
  misc_feature (20)..(20): Phosphorothioate 3'-Internucleotide Linkage
  misc_feature (20)..(21): n stands for thymidine
gggugccuuuuaaacucagnn

SEQ ID NO: 2746 - RNA, 21 nt, Artificial Sequence
  Description of Artificial Sequence:  siNA antisense region
  misc_feature (20)..(20): Phosphorothioate 3'-Internucleotide Linkage
  misc_feature (20)..(21): n stands for thymidine
caucagaggcccuccuugcnn

SEQ ID NO: 2747 - RNA, 21 nt, Artificial Sequence
  Description of Artificial Sequence:  siNA antisense region
  misc_feature (20)..(20): Phosphorothioate 3'-Internucleotide Linkage
  misc_feature (20)..(21): n stands for thymidine
gguuuugauucuuuccaggnn

SEQ ID NO: 2748 - RNA, 21 nt, Artificial Sequence
  Description of Artificial Sequence:  siNA sense region
  misc_feature (1)..(1): 5'-3 attached terminal deoxyabasic moeity
  misc_feature (21)..(21): 3'-3 attached terminal deoxyabasic moeity
  misc_feature (20)..(21): n stands for thymidine
cccacggaaaauuugagucnn

SEQ ID NO: 2749 - RNA, 21 nt, Artificial Sequence
  Description of Artificial Sequence:  siNA sense region
  misc_feature (1)..(1): 5'-3 attached terminal deoxyabasic moeity
  misc_feature (21)..(21): 3'-3 attached terminal deoxyabasic moeity
  misc_feature (20)..(21): n stands for thymidine
guagucuccgggaggaacgnn

SEQ ID NO: 2750 - RNA, 21 nt, Artificial Sequence
  Description of Artificial Sequence:  siNA sense region
  misc_feature (1)..(1): 5'-3 attached terminal deoxyabasic moeity
  misc_feature (21)..(21): 3'-3 attached terminal deoxyabasic moeity
  misc_feature (20)..(21): n stands for thymidine
ccaaaacuaagaaagguccnn

SEQ ID NO: 2751 - RNA, 21 nt, Artificial Sequence
  Description of Artificial Sequence:  siNA antisense region
  misc_feature (20)..(20): Phosphorothioate 3'-Internucleotide Linkage
  misc_feature (20)..(21): n stands for thymidine
gacucaaauuuuccgugggnn

SEQ ID NO: 2752 - RNA, 21 nt, Artificial Sequence
  Description of Artificial Sequence:  siNA antisense region
  misc_feature (20)..(20): Phosphorothioate 3'-Internucleotide Linkage
  misc_feature (20)..(21): n stands for thymidine
cguuccucccggagacuacnn

SEQ ID NO: 2753 - RNA, 21 nt, Artificial Sequence
  Description of Artificial Sequence:  siNA antisense region
  misc_feature (20)..(20): Phosphorothioate 3'-Internucleotide Linkage
  misc_feature (20)..(21): n stands for thymidine
ggaccuuucuuaguuuuggnn

SEQ ID NO: 2754 - RNA, 21 nt, Artificial Sequence
  Description of Artificial Sequence:  siNA antisense region
  misc_feature (1)..(2): 2'-deoxy-2'-fluoro
  misc_feature (3)..(3): 2'-deoxy
  misc_feature (4)..(5): 2'-deoxy-2'-fluoro
  misc_feature (6)..(6): 2'-deoxy
  misc_feature (7)..(7): 2'-deoxy-2'-fluoro
  misc_feature (8)..(8): 2'-deoxy
  misc_feature (9)..(12): 2'-deoxy-2'-fluoro
  misc_feature (13)..(13): 2'-deoxy
  misc_feature (14)..(14): 2'-deoxy-2'-fluoro
  misc_feature (15)..(16): 2'-deoxy
  misc_feature (17)..(18): 2'-deoxy-2'-fluoro
  misc_feature (19)..(19): 2'-deoxy
  misc_feature (20)..(21): n stands for 5-bromo-deoxy-uridine
  misc_feature (20)..(20): Phosphorothioate 3'-Internucleotide Linkage
uuguuguauuuugugguugnn

SEQ ID NO: 2755 - RNA, 21 nt, Artificial Sequence
  Description of Artificial Sequence:  siNA sense region
  misc_feature (1)..(1): 2'-deoxy-2'-fluoro
  misc_feature (2)..(2): 2'-deoxy
  misc_feature (3)..(4): 2'-deoxy-2'-fluoro
  misc_feature (5)..(9): 2'-deoxy
  misc_feature (10)..(17): 2'-deoxy-2'-fluoro
  misc_feature (18)..(18): 2'-deoxy
  misc_feature (19)..(19): 2'-deoxy-2'-fluoro
  misc_feature (20)..(21): n stands for 5-bromo-deoxy-uridine
  misc_feature (20)..(20): Phosphorothioate 3'-Internucleotide Linkage
caucagaggcccuccuugcnn

SEQ ID NO: 2756 - RNA, 21 nt, Artificial Sequence
  Description of Artificial Sequence:  siNA antisense region
  misc_feature (1)..(2): 2'-deoxy-2'-fluoro
  misc_feature (3)..(3): 2'-deoxy
  misc_feature (4)..(5): 2'-deoxy-2'-fluoro
  misc_feature (6)..(6): 2'-deoxy
  misc_feature (7)..(7): 2'-deoxy-2'-fluoro
  misc_feature (8)..(8): 2'-deoxy
  misc_feature (9)..(12): 2'-deoxy-2'-fluoro
  misc_feature (13)..(13): 2'-deoxy
  misc_feature (14)..(14): 2'-deoxy-2'-fluoro
  misc_feature (15)..(16): 2'-deoxy
  misc_feature (17)..(18): 2'-deoxy-2'-fluoro
  misc_feature (19)..(19): 2'-deoxy
  misc_feature (20)..(20): Phosphorothioate 3'-Internucleotide Linkage
  misc_feature (20)..(20): n stands for 5-bromo-deoxy-uridine
  misc_feature (21)..(21): n stands for thymidine
uuguuguauuuugugguugnn

SEQ ID NO: 2757 - RNA, 21 nt, Artificial Sequence
  Description of Artificial Sequence:  siNA sense region
  misc_feature (1)..(1): 2'-deoxy-2'-fluoro
  misc_feature (2)..(2): 2'-deoxy
  misc_feature (3)..(4): 2'-deoxy-2'-fluoro
  misc_feature (5)..(9): 2'-deoxy
  misc_feature (10)..(17): 2'-deoxy-2'-fluoro
  misc_feature (18)..(18): 2'-deoxy
  misc_feature (19)..(19): 2'-deoxy-2'-fluoro
  misc_feature (20)..(20): Phosphorothioate 3'-Internucleotide Linkage
  misc_feature (20)..(20): n stands for 5-bromo-deoxy-uridine
  misc_feature (21)..(21): n stands for thymidine
caucagaggcccuccuugcnn

SEQ ID NO: 2758 - RNA, 21 nt, Artificial Sequence
  Description of Artificial Sequence:  siNA sense region
  misc_feature (1)..(1): 5'-3 attached terminal deoxyabasic moeity
  misc_feature (21)..(21): 3'-3 attached terminal deoxyabasic moeity
  misc_feature (20)..(21): n stands for thymidine
caaccacaaaauacaacaann

SEQ ID NO: 2759 - RNA, 21 nt, Artificial Sequence
  Description of Artificial Sequence:  siNA sense region
  misc_feature (1)..(1): 5'-3 attached terminal deoxyabasic moeity
  misc_feature (21)..(21): 3'-3 attached terminal deoxyabasic moeity
  misc_feature (20)..(21): n stands for thymidine
aacaacauaaaacaccaacnn

SEQ ID NO: 2760 - RNA, 21 nt, Artificial Sequence
  Description of Artificial Sequence:  siNA antisense region
  misc_feature (20)..(20): Phosphorothioate 3'-Internucleotide Linkage
  misc_feature (20)..(21): n stands for thymidine
uuguuguauuuugugguugnn

SEQ ID NO: 2761 - RNA, 21 nt, Artificial Sequence
  Description of Artificial Sequence:  siNA antisense region
  misc_feature (20)..(20): Phosphorothioate 3'-Internucleotide Linkage
  misc_feature (20)..(21): n stands for thymidine
guugguguuuuauguuguunn

SEQ ID NO: 2762 - RNA, 21 nt, Artificial Sequence
  Description of Artificial Sequence:  siNA antisense region
  misc_feature (20)..(20): Phosphorothioate 3'-Internucleotide Linkage
  misc_feature (20)..(21): n stands for thymidine
uuguuguauuuugugguugnn

SEQ ID NO: 2763 - RNA, 21 nt, Artificial Sequence
  Description of Artificial Sequence:  siNA sense region
  misc_feature (1)..(1): 5'-3 attached terminal deoxyabasic moeity
  misc_feature (1)..(2): 2'-deoxy-2'-fluoro
  misc_feature (3)..(5): 2'-deoxy
  misc_feature (6)..(8): 2'-deoxy-2'-fluoro
  misc_feature (9)..(14): 2'-deoxy
  misc_feature (15)..(15): 2'-deoxy-2'-fluoro
  misc_feature (16)..(16): 2'-deoxy
  misc_feature (17)..(19): 2'-deoxy-2'-fluoro
  misc_feature (20)..(21): n stands for thymidine
  misc_feature (21)..(21): 3'-3 attached terminal deoxyabasic moeity
cugaguuuaaaaggcacccnn

SEQ ID NO: 2764 - RNA, 21 nt, Artificial Sequence
  Description of Artificial Sequence:  inverted control
  misc_feature (1)..(1): 5'-3 attached terminal deoxyabasic moeity
  misc_feature (1)..(3): 2'-deoxy-2'-fluoro
  misc_feature (4)..(4): 2'-deoxy
  misc_feature (5)..(5): 2'-deoxy-2'-fluoro
  misc_feature (6)..(11): 2'-deoxy
  misc_feature (12)..(14): 2'-deoxy-2'-fluoro
  misc_feature (15)..(17): 2'-deoxy
  misc_feature (18)..(19): 2'-deoxy-2'-fluoro
  misc_feature (20)..(21): n stands for thymidine
  misc_feature (21)..(21): 3'-3 attached terminal deoxyabasic moeity
cccacggaaaauuugagucnn

SEQ ID NO: 2765 - RNA, 21 nt, Artificial Sequence
  Description of Artificial Sequence:  siNA sense region
  misc_feature (1)..(1): 5'-3 attached terminal deoxyabasic moeity
  misc_feature (20)..(21): n stands for thymidine
  misc_feature (21)..(21): 3'-3 attached terminal deoxyabasic moeity
cugaguuuaaaaggcacccnn

SEQ ID NO: 2766 - RNA, 21 nt, Artificial Sequence
  Description of Artificial Sequence:  inverted control
  misc_feature (1)..(1): 5'-3 attached terminal deoxyabasic moeity
  misc_feature (20)..(21): n stands for thymidine
  misc_feature (21)..(21): 3'-3 attached terminal deoxyabasic moeity
cccacggaaaauuugagucnn

SEQ ID NO: 2767 - RNA, 21 nt, Artificial Sequence
  Description of Artificial Sequence:  siNA sense region
  misc_feature (1)..(1): 5'-3 attached terminal deoxyabasic moeity
  misc_feature (1)..(2): 2'-deoxy-2'-fluoro
  misc_feature (3)..(5): 2'-deoxy
  misc_feature (6)..(8): 2'-deoxy-2'-fluoro
  misc_feature (9)..(14): 2'-deoxy
  misc_feature (15)..(15): 2'-deoxy-2'-fluoro
  misc_feature (16)..(16): 2'-deoxy
  misc_feature (17)..(19): 2'-deoxy-2'-fluoro
  misc_feature (20)..(21): n stands for thymidine
  misc_feature (21)..(21): 3'-3 attached terminal deoxyabasic moeity
cugaguuuaaaaggcacccnn

SEQ ID NO: 2768 - RNA, 21 nt, Artificial Sequence
  Description of Artificial Sequence:  inverted control
  misc_feature (1)..(1): 5'-3 attached terminal deoxyabasic moeity
  misc_feature (1)..(3): 2'-deoxy-2'-fluoro
  misc_feature (4)..(4): 2'-deoxy
  misc_feature (5)..(5): 2'-deoxy-2'-fluoro
  misc_feature (6)..(11): 2'-deoxy
  misc_feature (12)..(14): 2'-deoxy-2'-fluoro
  misc_feature (15)..(17): 2'-deoxy
  misc_feature (18)..(19): 2'-deoxy-2'-fluoro
  misc_feature (20)..(21): n stands for thymidine
  misc_feature (21)..(21): 3'-3 attached terminal deoxyabasic moeity
cccacggaaaauuugagucnn

SEQ ID NO: 2769 - RNA, 21 nt, Artificial Sequence
  Description of Artificial Sequence:  siNA sense region
  misc_feature (1)..(1): 5'-3 attached terminal deoxyabasic moeity
  misc_feature (20)..(21): n stands for thymidine
  misc_feature (21)..(21): 3'-3 attached terminal deoxyabasic moeity
cugaguuuaaaaggcacccnn

SEQ ID NO: 2770 - RNA, 21 nt, Artificial Sequence
  Description of Artificial Sequence:  inverted control
  misc_feature (1)..(1): 5'-3 attached terminal deoxyabasic moeity
  misc_feature (20)..(21): n stands for thymidine
  misc_feature (21)..(21): 3'-3 attached terminal deoxyabasic moeity
cccacggaaaauuugagucnn

SEQ ID NO: 2771 - RNA, 21 nt, Artificial Sequence
  Description of Artificial Sequence:  siNA sense region
  misc_feature (20)..(21): n stands for thymidine
caugcuggacugcuggcacnn

SEQ ID NO: 2772 - RNA, 21 nt, Artificial Sequence
  Description of Artificial Sequence:  siNA sense region
  misc_feature (20)..(21): n stands for thymidine
augcuggacugcuggcacann

SEQ ID NO: 2773 - RNA, 21 nt, Artificial Sequence
  Description of Artificial Sequence:  siNA sense region
  misc_feature (20)..(21): n stands for thymidine
ugcuggacugcuggcacagnn

SEQ ID NO: 2774 - RNA, 21 nt, Artificial Sequence
  Description of Artificial Sequence:  siNA antisense region
  misc_feature (20)..(21): n stands for thymidine
gugccagcaguccagcaugnn

SEQ ID NO: 2775 - RNA, 21 nt, Artificial Sequence
  Description of Artificial Sequence:  siNA antisense region
  misc_feature (20)..(21): n stands for thymidine
ugugccagcaguccagcaunn

SEQ ID NO: 2776 - RNA, 21 nt, Artificial Sequence
  Description of Artificial Sequence:  siNA antisense region
  misc_feature (20)..(21): n stands for thymidine
cugugccagcaguccagcann

SEQ ID NO: 2777 - RNA, 21 nt, Artificial Sequence
  Description of Artificial Sequence:  siNA sense region
  misc_feature (3)..(5): 2'-O-methyl
  misc_feature (9)..(14): 2'-O-methyl
  misc_feature (16)..(16): 2'-O-methyl
  misc_feature (1)..(1): 5'-3 attached terminal deoxyabasic moeity
  misc_feature (21)..(21): 3'-3 attached terminal deoxyabasic moeity
  misc_feature (20)..(21): n stands for thymidine
cugaguuuaaaaggcacccnn

SEQ ID NO: 2778 - RNA, 21 nt, Artificial Sequence
  Description of Artificial Sequence:  siNA sense region
  misc_feature (1)..(1): 5'-3 attached terminal deoxyabasic moeity
  misc_feature (1)..(2): 2'-deoxy-2'-fluoro
  misc_feature (6)..(8): 2'-deoxy-2'-fluoro
  misc_feature (15)..(15): 2'-deoxy-2'-fluoro
  misc_feature (17)..(19): 2'-deoxy-2'-fluoro
  misc_feature (3)..(5): 2'-O-methyl
  misc_feature (9)..(14): 2'-O-methyl
  misc_feature (16)..(16): 2'-O-methyl
  misc_feature (20)..(21): n stands for thymidine
  misc_feature (21)..(21): 3'-3 attached terminal deoxyabasic moeity
cugaguuuaaaaggcacccnn

SEQ ID NO: 2779 - RNA, 21 nt, Artificial Sequence
  Description of Artificial Sequence:  siNA sense region
  misc_feature (1)..(1): 5'-3 attached terminal deoxyabasic moeity
  misc_feature (4)..(4): 2'-O-methyl
  misc_feature (6)..(11): 2'-O-methyl
  misc_feature (15)..(17): 2'-O-methyl
  misc_feature (20)..(21): n stands for thymidine
  misc_feature (21)..(21): 3'-3 attached terminal deoxyabasic moeity
cccacggaaaauuugagucnn

SEQ ID NO: 2780 - RNA, 21 nt, Artificial Sequence
  Description of Artificial Sequence:  siNA sense region
  misc_feature (1)..(1): 5'-3 attached terminal deoxyabasic moeity
  misc_feature (1)..(3): 2'-deoxy-2'-fluoro
  misc_feature (5)..(5): 2'-deoxy-2'-fluoro
  misc_feature (12)..(14): 2'-deoxy-2'-fluoro
  misc_feature (18)..(19): 2'-deoxy-2'-fluoro
  misc_feature (20)..(21): n stands for thymidine
  misc_feature (21)..(21): 3'-3 attached terminal deoxyabasic moeity
cccacggaaaauuugagucnn

SEQ ID NO: 2781 - RNA, 21 nt, Artificial Sequence
  Description of Artificial Sequence:  siNA sense region
  misc_feature (1)..(1): 5'-3 attached terminal deoxyabasic moeity
  misc_feature (20)..(21): n stands for thymidine
  misc_feature (21)..(21): 3'-3 attached terminal deoxyabasic moeity
gaacugaguuuaaaaggcann

SEQ ID NO: 2782 - RNA, 21 nt, Artificial Sequence
  Description of Artificial Sequence:  siNA sense region
  misc_feature (1)..(1): 5'-3 attached terminal deoxyabasic moeity
  misc_feature (20)..(21): n stands for thymidine
  misc_feature (21)..(21): 3'-3 attached terminal deoxyabasic moeity
aacugaguuuaaaaggcacnn

SEQ ID NO: 2783 - RNA, 21 nt, Artificial Sequence
  Description of Artificial Sequence:  siNA sense region
  misc_feature (1)..(1): 5'-3 attached terminal deoxyabasic moeity
  misc_feature (21)..(21): 3'-3 attached terminal deoxyabasic moeity
  misc_feature (20)..(21): n stands for thymidine
acugaguuuaaaaggcaccnn

SEQ ID NO: 2784 - RNA, 21 nt, Artificial Sequence
  Description of Artificial Sequence:  siNA sense region
  misc_feature (1)..(1): 5'-3 attached terminal deoxyabasic moeity
  misc_feature (21)..(21): 3'-3 attached terminal deoxyabasic moeity
  misc_feature (20)..(21): n stands for thymidine
ugaguuuaaaaggcacccann

SEQ ID NO: 2785 - RNA, 21 nt, Artificial Sequence
  Description of Artificial Sequence:  siNA sense region
  misc_feature (1)..(1): 5'-3 attached terminal deoxyabasic moeity
  misc_feature (21)..(21): 3'-3 attached terminal deoxyabasic moeity
  misc_feature (20)..(21): n stands for thymidine
gaguuuaaaaggcacccagnn

SEQ ID NO: 2786 - RNA, 21 nt, Artificial Sequence
  Description of Artificial Sequence:  siNA sense region
  misc_feature (1)..(1): 5'-3 attached terminal deoxyabasic moeity
  misc_feature (21)..(21): 3'-3 attached terminal deoxyabasic moeity
  misc_feature (20)..(21): n stands for thymidine
aguuuaaaaggcacccagcnn

SEQ ID NO: 2787 - RNA, 21 nt, Artificial Sequence
  Description of Artificial Sequence:  siNA sense region
  misc_feature (1)..(1): 5'-3 attached terminal deoxyabasic moeity
  misc_feature (21)..(21): 3'-3 attached terminal deoxyabasic moeity
  misc_feature (20)..(21): n stands for thymidine
guuuaaaaggcacccagcann

SEQ ID NO: 2788 - RNA, 21 nt, Artificial Sequence
  Description of Artificial Sequence:  siNA antisense region
  misc_feature (20)..(20): Phosphorothioate 3'-Internucleotide Linkage
  misc_feature (20)..(21): n stands for thymidine
ugccuuuuaaacucaguucnn

SEQ ID NO: 2789 - RNA, 21 nt, Artificial Sequence
  Description of Artificial Sequence:  siNA antisense region
  misc_feature (20)..(20): Phosphorothioate 3'-Internucleotide Linkage
  misc_feature (20)..(21): n stands for thymidine
gugccuuuuaaacucaguunn

SEQ ID NO: 2790 - RNA, 21 nt, Artificial Sequence
  Description of Artificial Sequence:  siNA antisense region
  misc_feature (20)..(20): Phosphorothioate 3'-Internucleotide Linkage
  misc_feature (20)..(21): n stands for thymidine
ggugccuuuuaaacucagunn

SEQ ID NO: 2791 - RNA, 21 nt, Artificial Sequence
  Description of Artificial Sequence:  siNA antisense region
  misc_feature (20)..(20): Phosphorothioate 3'-Internucleotide Linkage
  misc_feature (20)..(21): n stands for thymidine
ugggugccuuuuaaacucann

SEQ ID NO: 2792 - RNA, 21 nt, Artificial Sequence
  Description of Artificial Sequence:  siNA antisense region
  misc_feature (20)..(20): Phosphorothioate 3'-Internucleotide Linkage
  misc_feature (20)..(21): n stands for thymidine
cugggugccuuuuaaacucnn

SEQ ID NO: 2793 - RNA, 21 nt, Artificial Sequence
  Description of Artificial Sequence:  siNA antisense region
  misc_feature (20)..(20): Phosphorothioate 3'-Internucleotide Linkage
  misc_feature (20)..(21): n stands for thymidine
gcugggugccuuuuaaacunn

SEQ ID NO: 2794 - RNA, 21 nt, Artificial Sequence
  Description of Artificial Sequence:  siNA antisense region
  misc_feature (20)..(20): Phosphorothioate 3'-Internucleotide Linkage
  misc_feature (20)..(21): n stands for thymidine
ugcugggugccuuuuaaacnn

SEQ ID NO: 2795 - RNA, 21 nt, Artificial Sequence
  Description of Artificial Sequence:  siNA sense region
  misc_feature (1)..(1): 5'-3 attached terminal deoxyabasic moeity
  misc_feature (21)..(21): 3'-3 attached terminal deoxyabasic moeity
  misc_feature (20)..(21): n stands for thymidine
acggaaaauuugagucaagnn

SEQ ID NO: 2796 - RNA, 21 nt, Artificial Sequence
  Description of Artificial Sequence:  siNA sense region
  misc_feature (1)..(1): 5'-3 attached terminal deoxyabasic moeity
  misc_feature (21)..(21): 3'-3 attached terminal deoxyabasic moeity
  misc_feature (20)..(21): n stands for thymidine
cacggaaaauuugagucaann

SEQ ID NO: 2797 - RNA, 21 nt, Artificial Sequence
  Description of Artificial Sequence:  siNA sense region
  misc_feature (1)..(1): 5'-3 attached terminal deoxyabasic moeity
  misc_feature (21)..(21): 3'-3 attached terminal deoxyabasic moeity
  misc_feature (20)..(21): n stands for thymidine
ccacggaaaauuugagucann

SEQ ID NO: 2798 - RNA, 21 nt, Artificial Sequence
  Description of Artificial Sequence:  siNA sense region
  misc_feature (1)..(1): 5'-3 attached terminal deoxyabasic moeity
  misc_feature (21)..(21): 3'-3 attached terminal deoxyabasic moeity
  misc_feature (20)..(21): n stands for thymidine
acccacggaaaauuugagunn

SEQ ID NO: 2799 - RNA, 21 nt, Artificial Sequence
  Description of Artificial Sequence:  siNA sense region
  misc_feature (1)..(1): 5'-3 attached terminal deoxyabasic moeity
  misc_feature (21)..(21): 3'-3 attached terminal deoxyabasic moeity
  misc_feature (20)..(21): n stands for thymidine
gacccacggaaaauuugagnn

SEQ ID NO: 2800 - RNA, 21 nt, Artificial Sequence
  Description of Artificial Sequence:  siNA sense region
  misc_feature (1)..(1): 5'-3 attached terminal deoxyabasic moeity
  misc_feature (21)..(21): 3'-3 attached terminal deoxyabasic moeity
  misc_feature (20)..(21): n stands for thymidine
cgacccacggaaaauuugann

SEQ ID NO: 2801 - RNA, 21 nt, Artificial Sequence
  Description of Artificial Sequence:  siNA sense region
  misc_feature (1)..(1): 5'-3 attached terminal deoxyabasic moeity
  misc_feature (21)..(21): 3'-3 attached terminal deoxyabasic moeity
  misc_feature (20)..(21): n stands for thymidine
acgacccacggaaaauuugnn

SEQ ID NO: 2802 - RNA, 21 nt, Artificial Sequence
  Description of Artificial Sequence:  siNA antisense region
  misc_feature (20)..(20): Phosphorothioate 3'-Internucleotide Linkage
  misc_feature (20)..(21): n stands for thymidine
cuugacucaaauuuuccgunn

SEQ ID NO: 2803 - RNA, 21 nt, Artificial Sequence
  Description of Artificial Sequence:  siNA antisense region
  misc_feature (20)..(20): Phosphorothioate 3'-Internucleotide Linkage
  misc_feature (20)..(21): n stands for thymidine
uugacucaaauuuuccgugnn

SEQ ID NO: 2804 - RNA, 21 nt, Artificial Sequence
  Description of Artificial Sequence:  siNA antisense region
  misc_feature (20)..(20): Phosphorothioate 3'-Internucleotide Linkage
  misc_feature (20)..(21): n stands for thymidine
ugacucaaauuuuccguggnn

SEQ ID NO: 2805 - RNA, 21 nt, Artificial Sequence
  Description of Artificial Sequence:  siNA antisense region
  misc_feature (20)..(20): Phosphorothioate 3'-Internucleotide Linkage
  misc_feature (20)..(21): n stands for thymidine
acucaaauuuuccgugggunn

SEQ ID NO: 2806 - RNA, 21 nt, Artificial Sequence
  Description of Artificial Sequence:  siNA antisense region
  misc_feature (20)..(20): Phosphorothioate 3'-Internucleotide Linkage
  misc_feature (20)..(21): n stands for thymidine
cucaaauuuuccgugggucnn

SEQ ID NO: 2807 - RNA, 21 nt, Artificial Sequence
  Description of Artificial Sequence:  siNA antisense region
  misc_feature (20)..(20): Phosphorothioate 3'-Internucleotide Linkage
  misc_feature (20)..(21): n stands for thymidine
ucaaauuuuccgugggucgnn

SEQ ID NO: 2808 - RNA, 21 nt, Artificial Sequence
  Description of Artificial Sequence:  siNA antisense region
  misc_feature (20)..(20): Phosphorothioate 3'-Internucleotide Linkage
  misc_feature (20)..(21): n stands for thymidine
caaauuuuccgugggucgunn

SEQ ID NO: 2809 - RNA, 19 nt, Artificial Sequence
  Description of Artificial Sequence:  siNA antisense region
  misc_feature (20)..(20): Phosphorothioate 3'-Internucleotide Linkage
  misc_feature (20)..(20): X stands for nitroindole universal base
gggugccuuuuaaacucag

SEQ ID NO: 2810 - RNA, 28 nt, Artificial Sequence
  Description of Artificial Sequence:  siNA antisense region
  misc_feature (1)..(1): 5'-3 attached terminal phosphate
  misc_feature (28)..(28): 3'-3 attached terminal deoxyabasic moeity
gggugccuuuuaaacucgaguuuaaaag

SEQ ID NO: 2811 - RNA, 30 nt, Artificial Sequence
  Description of Artificial Sequence:  siNA antisense region
  misc_feature (1)..(1): 5'-3 attached terminal phosphate
  misc_feature (30)..(30): 3'-3 attached terminal deoxyabasic moeity
gggugccuuuuaaacucaggaguuuaaaag

SEQ ID NO: 2812 - RNA, 32 nt, Artificial Sequence
  Description of Artificial Sequence:  siNA antisense region
  misc_feature (1)..(1): 5'-3 attached terminal phosphate
  misc_feature (32)..(32): 3'-3 attached terminal deoxyabasic moeity
caucagaggcccuccuugcaaggagggccucu

SEQ ID NO: 2813 - RNA, 31 nt, Artificial Sequence
  Description of Artificial Sequence:  siNA antisense region
  misc_feature (1)..(1): 5'-3 attached terminal phosphate
  misc_feature (31)..(31): 3'-3 attached terminal deoxyabasic moeity
caucagaggcccuccuuaaggagggccucug

SEQ ID NO: 2814 - RNA, 29 nt, Artificial Sequence
  Description of Artificial Sequence:  siNA antisense region
  misc_feature (1)..(1): 5'-3 attached terminal phosphate
  misc_feature (29)..(29): 3'-3 attached terminal deoxyabasic moeity
caucagaggcccuccuaggagggccucug

SEQ ID NO: 2815 - RNA, 21 nt, Artificial Sequence
  Description of Artificial Sequence:  siNA sense region
  misc_feature (1)..(1): 5'-3 attached terminal deoxyabasic moeity
  misc_feature (4)..(5): 2'-deoxy-2'-fluoro
  misc_feature (9)..(11): 2'-deoxy-2'-fluoro
  misc_feature (18)..(18): 2'-deoxy-2'-fluoro
  misc_feature (20)..(21): n stands for thymidine
  misc_feature (21)..(21): 3'-3 attached terminal deoxyabasic moeity
gaacugaguuuaaaaggcann

SEQ ID NO: 2816 - RNA, 21 nt, Artificial Sequence
  Description of Artificial Sequence:  siNA sense region
  misc_feature (1)..(1): 5'-3 attached terminal deoxyabasic moeity
  misc_feature (3)..(4): 2'-deoxy-2'-fluoro
  misc_feature (8)..(10): 2'-deoxy-2'-fluoro
  misc_feature (17)..(17): 2'-deoxy-2'-fluoro
  misc_feature (19)..(19): 2'-deoxy-2'-fluoro
  misc_feature (20)..(21): n stands for thymidine
  misc_feature (21)..(21): 3'-3 attached terminal deoxyabasic moeity
aacugaguuuaaaaggcacnn

SEQ ID NO: 2817 - RNA, 21 nt, Artificial Sequence
  Description of Artificial Sequence:  siNA sense region
  misc_feature (1)..(1): 5'-3 attached terminal deoxyabasic moeity
  misc_feature (2)..(3): 2'-deoxy-2'-fluoro
  misc_feature (7)..(9): 2'-deoxy-2'-fluoro
  misc_feature (16)..(16): 2'-deoxy-2'-fluoro
  misc_feature (18)..(19): 2'-deoxy-2'-fluoro
  misc_feature (20)..(21): n stands for thymidine
  misc_feature (21)..(21): 3'-3 attached terminal deoxyabasic moeity
acugaguuuaaaaggcaccnn

SEQ ID NO: 2818 - RNA, 21 nt, Artificial Sequence
  Description of Artificial Sequence:  siNA sense region
  misc_feature (1)..(1): 5'-3 attached terminal deoxyabasic moeity
  misc_feature (1)..(1): 2'-deoxy-2'-fluoro
  misc_feature (5)..(7): 2'-deoxy-2'-fluoro
  misc_feature (14)..(14): 2'-deoxy-2'-fluoro
  misc_feature (16)..(18): 2'-deoxy-2'-fluoro
  misc_feature (20)..(21): n stands for thymidine
  misc_feature (21)..(21): 3'-3 attached terminal deoxyabasic moeity
ugaguuuaaaaggcacccann

SEQ ID NO: 2819 - RNA, 21 nt, Artificial Sequence
  Description of Artificial Sequence:  siNA sense region
  misc_feature (1)..(1): 5'-3 attached terminal deoxyabasic moeity
  misc_feature (4)..(6): 2'-deoxy-2'-fluoro
  misc_feature (13)..(13): 2'-deoxy-2'-fluoro
  misc_feature (15)..(17): 2'-deoxy-2'-fluoro
  misc_feature (20)..(21): n stands for thymidine
  misc_feature (21)..(21): 3'-3 attached terminal deoxyabasic moeity
gaguuuaaaaggcacccagnn

SEQ ID NO: 2820 - RNA, 21 nt, Artificial Sequence
  Description of Artificial Sequence:  siNA sense region
  misc_feature (1)..(1): 5'-3 attached terminal deoxyabasic moeity
  misc_feature (3)..(5): 2'-deoxy-2'-fluoro
  misc_feature (12)..(12): 2'-deoxy-2'-fluoro
  misc_feature (14)..(16): 2'-deoxy-2'-fluoro
  misc_feature (19)..(19): 2'-deoxy-2'-fluoro
  misc_feature (20)..(21): n stands for thymidine
  misc_feature (21)..(21): 3'-3 attached terminal deoxyabasic moeity
aguuuaaaaggcacccagcnn

SEQ ID NO: 2821 - RNA, 21 nt, Artificial Sequence
  Description of Artificial Sequence:  siNA sense region
  misc_feature (1)..(1): 5'-3 attached terminal deoxyabasic moeity
  misc_feature (2)..(4): 2'-deoxy-2'-fluoro
  misc_feature (11)..(11): 2'-deoxy-2'-fluoro
  misc_feature (13)..(15): 2'-deoxy-2'-fluoro
  misc_feature (18)..(18): 2'-deoxy-2'-fluoro
  misc_feature (20)..(21): n stands for thymidine
  misc_feature (21)..(21): 3'-3 attached terminal deoxyabasic moeity
guuuaaaaggcacccagcann

SEQ ID NO: 2822 - RNA, 21 nt, Artificial Sequence
  Description of Artificial Sequence:  siNA antisense region
  misc_feature (1)..(1): 2'-deoxy-2'-fluoro
  misc_feature (3)..(8): 2'-deoxy-2'-fluoro
  misc_feature (12)..(14): 2'-deoxy-2'-fluoro
  misc_feature (17)..(19): 2'-deoxy-2'-fluoro
  misc_feature (20)..(20): Phosphorothioate 3'-Internucleotide Linkage
  misc_feature (20)..(21): n stands for thymidine
ugccuuuuaaacucaguucnn

SEQ ID NO: 2823 - RNA, 21 nt, Artificial Sequence
  Description of Artificial Sequence:  siNA antisense region
  misc_feature (4)..(9): 2'-deoxy-2'-fluoro
  misc_feature (13)..(15): 2'-deoxy-2'-fluoro
  misc_feature (18)..(19): 2'-deoxy-2'-fluoro
  misc_feature (20)..(21): n stands for thymidine
  misc_feature (20)..(20): Phosphorothioate 3'-Internucleotide Linkage
gugccuuuuaaacucaguunn

SEQ ID NO: 2824 - RNA, 21 nt, Artificial Sequence
  Description of Artificial Sequence:  siNA antisense region
  misc_feature (3)..(3): 2'-deoxy-2'-fluoro
  misc_feature (5)..(10): 2'-deoxy-2'-fluoro
  misc_feature (14)..(16): 2'-deoxy-2'-fluoro
  misc_feature (19)..(19): 2'-deoxy-2'-fluoro
  misc_feature (20)..(20): Phosphorothioate 3'-Internucleotide Linkage
  misc_feature (20)..(21): n stands for thymidine
ggugccuuuuaaacucagunn

SEQ ID NO: 2825 - RNA, 21 nt, Artificial Sequence
  Description of Artificial Sequence:  siNA antisense region
  misc_feature (1)..(1): 2'-deoxy-2'-fluoro
  misc_feature (5)..(5): 2'-deoxy-2'-fluoro
  misc_feature (7)..(12): 2'-deoxy-2'-fluoro
  misc_feature (16)..(18): 2'-deoxy-2'-fluoro
  misc_feature (20)..(21): n stands for thymidine
  misc_feature (20)..(20): Phosphorothioate 3'-Internucleotide Linkage
ugggugccuuuuaaacucann

SEQ ID NO: 2826 - RNA, 21 nt, Artificial Sequence
  Description of Artificial Sequence:  siNA antisense region
  misc_feature (1)..(2): 2'-deoxy-2'-fluoro
  misc_feature (6)..(6): 2'-deoxy-2'-fluoro
  misc_feature (8)..(13): 2'-deoxy-2'-fluoro
  misc_feature (17)..(19): 2'-deoxy-2'-fluoro
  misc_feature (20)..(20): Phosphorothioate 3'-Internucleotide Linkage
  misc_feature (20)..(21): n stands for thymidine
cugggugccuuuuaaacucnn

SEQ ID NO: 2827 - RNA, 21 nt, Artificial Sequence
  Description of Artificial Sequence:  siNA antisense region
  misc_feature (2)..(3): 2'-deoxy-2'-fluoro
  misc_feature (7)..(7): 2'-deoxy-2'-fluoro
  misc_feature (9)..(14): 2'-deoxy-2'-fluoro
  misc_feature (18)..(19): 2'-deoxy-2'-fluoro
  misc_feature (20)..(21): n stands for thymidine
  misc_feature (20)..(20): Phosphorothioate 3'-Internucleotide Linkage
gcugggugccuuuuaaacunn

SEQ ID NO: 2828 - RNA, 21 nt, Artificial Sequence
  Description of Artificial Sequence:  siNA antisense region
  misc_feature (1)..(1): 2'-deoxy-2'-fluoro
  misc_feature (3)..(4): 2'-deoxy-2'-fluoro
  misc_feature (8)..(8): 2'-deoxy-2'-fluoro
  misc_feature (10)..(15): 2'-deoxy-2'-fluoro
  misc_feature (19)..(19): 2'-deoxy-2'-fluoro
  misc_feature (20)..(20): Phosphorothioate 3'-Internucleotide Linkage
  misc_feature (20)..(21): n stands for thymidine
ugcugggugccuuuuaaacnn

SEQ ID NO: 2829 - RNA, 21 nt, Artificial Sequence
  Description of Artificial Sequence:  siNA sense region
  misc_feature (1)..(1): 5'-3 attached terminal deoxyabasic moeity
  misc_feature (2)..(2): 2'-deoxy-2'-fluoro
  misc_feature (9)..(11): 2'-deoxy-2'-fluoro
  misc_feature (15)..(16): 2'-deoxy-2'-fluoro
  misc_feature (20)..(21): n stands for thymidine
  misc_feature (21)..(21): 3'-3 attached terminal deoxyabasic moeity
acggaaaauuugagucaagnn

SEQ ID NO: 2830 - RNA, 21 nt, Artificial Sequence
  Description of Artificial Sequence:  siNA sense region
  misc_feature (1)..(1): 2'-deoxy-2'-fluoro
  misc_feature (1)..(1): 5'-3 attached terminal deoxyabasic moeity
  misc_feature (3)..(3): 2'-deoxy-2'-fluoro
  misc_feature (10)..(12): 2'-deoxy-2'-fluoro
  misc_feature (16)..(17): 2'-deoxy-2'-fluoro
  misc_feature (20)..(21): n stands for thymidine
  misc_feature (21)..(21): 3'-3 attached terminal deoxyabasic moeity
cacggaaaauuugagucaann

SEQ ID NO: 2831 - RNA, 21 nt, Artificial Sequence
  Description of Artificial Sequence:  siNA sense region
  misc_feature (1)..(1): 5'-3 attached terminal deoxyabasic moeity
  misc_feature (1)..(2): 2'-deoxy-2'-fluoro
  misc_feature (4)..(4): 2'-deoxy-2'-fluoro
  misc_feature (11)..(13): 2'-deoxy-2'-fluoro
  misc_feature (17)..(18): 2'-deoxy-2'-fluoro
  misc_feature (20)..(21): n stands for thymidine
  misc_feature (21)..(21): 3'-3 attached terminal deoxyabasic moeity
ccacggaaaauuugagucann

SEQ ID NO: 2832 - RNA, 21 nt, Artificial Sequence
  Description of Artificial Sequence:  siNA sense region
  misc_feature (1)..(1): 5'-3 attached terminal deoxyabasic moeity
  misc_feature (2)..(4): 2'-deoxy-2'-fluoro
  misc_feature (6)..(6): 2'-deoxy-2'-fluoro
  misc_feature (13)..(15): 2'-deoxy-2'-fluoro
  misc_feature (19)..(19): 2'-deoxy-2'-fluoro
  misc_feature (20)..(21): n stands for thymidine
  misc_feature (21)..(21): 3'-3 attached terminal deoxyabasic moeity
acccacggaaaauuugagunn

SEQ ID NO: 2833 - RNA, 21 nt, Artificial Sequence
  Description of Artificial Sequence:  siNA sense region
  misc_feature (1)..(1): 5'-3 attached terminal deoxyabasic moeity
  misc_feature (3)..(5): 2'-deoxy-2'-fluoro
  misc_feature (7)..(7): 2'-deoxy-2'-fluoro
  misc_feature (14)..(16): 2'-deoxy-2'-fluoro
  misc_feature (20)..(21): n stands for thymidine
  misc_feature (21)..(21): 3'-3 attached terminal deoxyabasic moeity
gacccacggaaaauuugagnn

SEQ ID NO: 2834 - RNA, 21 nt, Artificial Sequence
  Description of Artificial Sequence:  siNA sense region
  misc_feature (1)..(1): 2'-deoxy-2'-fluoro
  misc_feature (1)..(1): 5'-3 attached terminal deoxyabasic moeity
  misc_feature (4)..(6): 2'-deoxy-2'-fluoro
  misc_feature (8)..(8): 2'-deoxy-2'-fluoro
  misc_feature (15)..(17): 2'-deoxy-2'-fluoro
  misc_feature (20)..(21): n stands for thymidine
  misc_feature (21)..(21): 3'-3 attached terminal deoxyabasic moeity
cgacccacggaaaauuugann

SEQ ID NO: 2835 - RNA, 21 nt, Artificial Sequence
  Description of Artificial Sequence:  siNA sense region
  misc_feature (1)..(1): 5'-3 attached terminal deoxyabasic moeity
  misc_feature (2)..(2): 2'-deoxy-2'-fluoro
  misc_feature (5)..(7): 2'-deoxy-2'-fluoro
  misc_feature (9)..(9): 2'-deoxy-2'-fluoro
  misc_feature (16)..(18): 2'-deoxy-2'-fluoro
  misc_feature (20)..(21): n stands for thymidine
  misc_feature (21)..(21): 3'-3 attached terminal deoxyabasic moeity
acgacccacggaaaauuugnn

SEQ ID NO: 2836 - RNA, 21 nt, Artificial Sequence
  Description of Artificial Sequence:  siNA antisense region
  misc_feature (1)..(3): 2'-deoxy-2'-fluoro
  misc_feature (6)..(8): 2'-deoxy-2'-fluoro
  misc_feature (12)..(17): 2'-deoxy-2'-fluoro
  misc_feature (19)..(19): 2'-deoxy-2'-fluoro
  misc_feature (20)..(20): Phosphorothioate 3'-Internucleotide Linkage
  misc_feature (20)..(21): n stands for thymidine
cuugacucaaauuuuccgunn

SEQ ID NO: 2837 - RNA, 21 nt, Artificial Sequence
  Description of Artificial Sequence:  siNA antisense region
  misc_feature (1)..(2): 2'-deoxy-2'-fluoro
  misc_feature (5)..(7): 2'-deoxy-2'-fluoro
  misc_feature (11)..(16): 2'-deoxy-2'-fluoro
  misc_feature (18)..(18): 2'-deoxy-2'-fluoro
  misc_feature (20)..(21): n stands for thymidine
  misc_feature (20)..(20): Phosphorothioate 3'-Internucleotide Linkage
uugacucaaauuuuccgugnn

SEQ ID NO: 2838 - RNA, 21 nt, Artificial Sequence
  Description of Artificial Sequence:  siNA antisense region
  misc_feature (1)..(1): 2'-deoxy-2'-fluoro
  misc_feature (4)..(6): 2'-deoxy-2'-fluoro
  misc_feature (10)..(15): 2'-deoxy-2'-fluoro
  misc_feature (17)..(17): 2'-deoxy-2'-fluoro
  misc_feature (20)..(20): 2'-deoxy-2'-fluoro
  misc_feature (20)..(21): n stands for thymidine
ugacucaaauuuuccguggnn

SEQ ID NO: 2839 - RNA, 21 nt, Artificial Sequence
  Description of Artificial Sequence:  siNA antisense region
  misc_feature (2)..(4): 2'-deoxy-2'-fluoro
  misc_feature (8)..(13): 2'-deoxy-2'-fluoro
  misc_feature (15)..(15): 2'-deoxy-2'-fluoro
  misc_feature (19)..(19): 2'-deoxy-2'-fluoro
  misc_feature (20)..(21): n stands for thymidine
  misc_feature (20)..(20): Phosphorothioate 3'-Internucleotide Linkage
  misc_feature (20)..(19): 2'-deoxy-2'-fluoro
acucaaauuuuccgugggunn

SEQ ID NO: 2840 - RNA, 21 nt, Artificial Sequence
  Description of Artificial Sequence:  siNA antisense region
  misc_feature (1)..(3): 2'-deoxy-2'-fluoro
  misc_feature (7)..(12): 2'-deoxy-2'-fluoro
  misc_feature (14)..(14): 2'-deoxy-2'-fluoro
  misc_feature (18)..(19): 2'-deoxy-2'-fluoro
  misc_feature (20)..(20): Phosphorothioate 3'-Internucleotide Linkage
  misc_feature (20)..(21): n stands for thymidine
cucaaauuuuccgugggucnn

SEQ ID NO: 2841 - RNA, 21 nt, Artificial Sequence
  Description of Artificial Sequence:  siNA antisense region
  misc_feature (1)..(2): 2'-deoxy-2'-fluoro
  misc_feature (6)..(11): 2'-deoxy-2'-fluoro
  misc_feature (13)..(13): 2'-deoxy-2'-fluoro
  misc_feature (17)..(18): 2'-deoxy-2'-fluoro
  misc_feature (20)..(21): n stands for thymidine
  misc_feature (20)..(20): n stands for thymidine
  misc_feature (20)..(20): 2'-deoxy-2'-fluoro
ucaaauuuuccgugggucgnn

SEQ ID NO: 2842 - RNA, 21 nt, Artificial Sequence
  Description of Artificial Sequence:  siNA antisense region
  misc_feature (1)..(1): 2'-deoxy-2'-fluoro
  misc_feature (5)..(10): 2'-deoxy-2'-fluoro
  misc_feature (12)..(12): 2'-deoxy-2'-fluoro
  misc_feature (16)..(17): 2'-deoxy-2'-fluoro
  misc_feature (19)..(19): 2'-deoxy-2'-fluoro
  misc_feature (20)..(20): Phosphorothioate 3'-Internucleotide Linkage
  misc_feature (20)..(21): n stands for thymidine
caaauuuuccgugggucgunn

SEQ ID NO: 2843 - RNA, 21 nt, Artificial Sequence
  Description of Artificial Sequence:  siNA sense region
  misc_feature (20)..(21): n stands for thymidine
  misc_feature (21)..(21): 3'-3 attached terminal deoxyabasic moeity
cugaguuuaaaaggcacccnn

SEQ ID NO: 2844 - RNA, 21 nt, Artificial Sequence
  Description of Artificial Sequence:  siNA antisense region
  misc_feature (1)..(1): 5'-3 attached terminal phosphate
  misc_feature (1)..(3): 2'-O-methyl
  misc_feature (5)..(5): 2'-O-methyl
  misc_feature (12)..(14): 2'-O-methyl
  misc_feature (18)..(19): 2'-O-methyl
  misc_feature (4)..(4): 2'-deoxy-2'-Fluoro
  misc_feature (6)..(11): 2'-deoxy-2'-Fluoro
  misc_feature (15)..(17): 2'-deoxy-2'-Fluoro
  misc_feature (20)..(20): Phosphorothioate 3'-Internucleotide Linkage
  misc_feature (20)..(21): n stands for thymidine
gggugccuuuuaaacucagnn

SEQ ID NO: 2845 - RNA, 21 nt, Artificial Sequence
  Description of Artificial Sequence:  siNA antisense region
  misc_feature (1)..(1): 5'-Amino Mod C3-TFA
  misc_feature (1)..(3): 2'-O-methyl
  misc_feature (4)..(4): 2'-deoxy-2'-fluoro
  misc_feature (5)..(5): 2'-O-methyl
  misc_feature (6)..(11): 2'-deoxy-2'-fluoro
  misc_feature (12)..(14): 2'-O-methyl
  misc_feature (15)..(17): 2'-deoxy-2'-fluoro
  misc_feature (18)..(19): 2'-O-methyl
  misc_feature (20)..(20): Phosphorothioate 3'-Internucleotide Linkage
  misc_feature (20)..(21): n stands for thymidine
gggugccuuuuaaacucagnn

SEQ ID NO: 2846 - RNA, 21 nt, Artificial Sequence
  Description of Artificial Sequence:  siNA antisense region
  misc_feature (1)..(1): 5'-Amino Mod C3-TFA
  misc_feature (1)..(3): 2'-O-methyl
  misc_feature (4)..(4): 2'-deoxy-2'-fluoro
  misc_feature (5)..(5): 2'-O-methyl
  misc_feature (6)..(11): 2'-deoxy-2'-fluoro
  misc_feature (12)..(14): 2'-O-methyl
  misc_feature (15)..(17): 2'-deoxy-2'-fluoro
  misc_feature (18)..(19): 2'-O-methyl
  misc_feature (20)..(20): Phosphorothioate 3'-Internucleotide Linkage
  misc_feature (20)..(21): n stands for thymidine
gggugccuuuuaaacucagnn

SEQ ID NO: 2847 - RNA, 21 nt, Artificial Sequence
  Description of Artificial Sequence:  siNA antisense region
  misc_feature (1)..(1): n stands for inosine
  misc_feature (20)..(21): n stands for thymidine
nggugccuuuuaaacucagnn

SEQ ID NO: 2848 - RNA, 21 nt, Artificial Sequence
  Description of Artificial Sequence:  siNA sense region
  misc_feature (1)..(1): 5'-3 attached terminal deoxyabasic moeity
  misc_feature (1)..(1): 2'-deoxy-2'-fluoro
  misc_feature (2)..(2): 2'-deoxy
  misc_feature (3)..(3): 2'-deoxy-2'-fluoro
  misc_feature (4)..(4): 2'-deoxy
  misc_feature (5)..(6): 2'-deoxy-2'-fluoro
  misc_feature (7)..(9): 2'-deoxy
  misc_feature (10)..(11): 2'-deoxy-2'-fluoro
  misc_feature (12)..(12): 2'-deoxy
  misc_feature (13)..(14): 2'-deoxy-2'-fluoro
  misc_feature (15)..(16): 2'-deoxy
  misc_feature (17)..(17): 2'-deoxy-2'-fluoro
  misc_feature (18)..(18): 2'-deoxy
  misc_feature (19)..(19): 2'-deoxy-2'-fluoro
  misc_feature (20)..(21): n stands for thymidine
  misc_feature (21)..(21): 3'-3 attached terminal deoxyabasic moeity
caugcuggacugcuggcacnn

SEQ ID NO: 2849 - RNA, 21 nt, Artificial Sequence
  Description of Artificial Sequence:  siNA sense region
  misc_feature (1)..(1): 5'-3 attached terminal deoxyabasic moeity
  misc_feature (1)..(1): 2'-deoxy
  misc_feature (2)..(2): 2'-deoxy-2'-fluoro
  misc_feature (3)..(3): 2'-deoxy
  misc_feature (4)..(5): 2'-deoxy-2'-fluoro
  misc_feature (6)..(8): 2'-deoxy
  misc_feature (9)..(10): 2'-deoxy-2'-fluoro
  misc_feature (11)..(11): 2'-deoxy
  misc_feature (12)..(13): 2'-deoxy-2'-fluoro
  misc_feature (14)..(15): 2'-deoxy
  misc_feature (16)..(16): 2'-deoxy-2'-fluoro
  misc_feature (17)..(17): 2'-deoxy
  misc_feature (18)..(18): 2'-deoxy-2'-fluoro
  misc_feature (19)..(19): 2'-deoxy
  misc_feature (20)..(21): n stands for thymidine
  misc_feature (21)..(21): 3'-3 attached terminal deoxyabasic moeity
augcuggacugcuggcacann

SEQ ID NO: 2850 - RNA, 21 nt, Artificial Sequence
  Description of Artificial Sequence:  siNA sense region
  misc_feature (1)..(1): 2'-O-methyl
  misc_feature (2)..(2): 2'-deoxy-2'-Fluoro
  misc_feature (3)..(3): 2'-O-methyl
  misc_feature (4)..(5): 2'-deoxy-2'-Fluoro
  misc_feature (6)..(7): 2'-O-methyl
  misc_feature (8)..(8): 2'-deoxy-2'-Fluoro
  misc_feature (9)..(10): 2'-O-methyl
  misc_feature (11)..(13): 2'-deoxy-2'-Fluoro
  misc_feature (14)..(15): 2'-O-methyl
  misc_feature (16)..(16): 2'-deoxy-2'-Fluoro
  misc_feature (17)..(17): 2'-O-methyl
  misc_feature (18)..(18): 2'-deoxy-2'-Fluoro
  misc_feature (19)..(19): 2'-O-methyl
  misc_feature (20)..(21): n stands for thymidine
  misc_feature (20)..(20): Phosphorothioate 3'-Internucleotide Linkage
gugccagcaguccagcaugnn

SEQ ID NO: 2851 - RNA, 21 nt, Artificial Sequence
  Description of Artificial Sequence:  siNA antisense region
  misc_feature (1)..(1): 2'-deoxy-2'-fluoro
  misc_feature (2)..(2): 2'-O-methyl
  misc_feature (3)..(3): 2'-deoxy-2'-fluoro
  misc_feature (4)..(4): 2'-O-methyl
  misc_feature (5)..(6): 2'-deoxy-2'-fluoro
  misc_feature (7)..(8): 2'-O-methyl
  misc_feature (9)..(9): 2'-deoxy-2'-fluoro
  misc_feature (10)..(11): 2'-O-methyl
  misc_feature (12)..(14): 2'-deoxy-2'-fluoro
  misc_feature (15)..(16): 2'-O-methyl
  misc_feature (17)..(17): 2'-deoxy-2'-fluoro
  misc_feature (18)..(18): 2'-O-methyl
  misc_feature (19)..(19): 2'-deoxy-2'-fluoro
  misc_feature (20)..(21): n stands for thymidine
  misc_feature (20)..(20): Phosphorothioate 3'-Internucleotide Linkage
ugugccagcaguccagcaunn

SEQ ID NO: 2852 - RNA, 21 nt, Artificial Sequence
  Description of Artificial Sequence:  siNA sense region
  misc_feature (1)..(1): 5'-3 attached terminal deoxyabasic moeity
  misc_feature (21)..(21): 3'-3 attached terminal deoxyabasic moeity
  misc_feature (20)..(21): n stands for thymidine
caugcuggacugcuggcacnn

SEQ ID NO: 2853 - RNA, 21 nt, Artificial Sequence
  Description of Artificial Sequence:  siNA sense region
  misc_feature (1)..(1): 5'-3 attached terminal deoxyabasic moeity
  misc_feature (21)..(21): 3'-3 attached terminal deoxyabasic moeity
  misc_feature (20)..(21): n stands for thymidine
augcuggacugcuggcacann

SEQ ID NO: 2854 - RNA, 21 nt, Artificial Sequence
  Description of Artificial Sequence:  siNA antisense region
  misc_feature (20)..(20): Phosphorothioate 3'-Internucleotide Linkage
  misc_feature (20)..(21): n stands for thymidine
gugccagcaguccagcaugnn

SEQ ID NO: 2855 - RNA, 21 nt, Artificial Sequence
  Description of Artificial Sequence:  siNA antisense region
  misc_feature (20)..(20): Phosphorothioate 3'-Internucleotide Linkage
  misc_feature (20)..(21): n stands for thymidine
ugugccagcaguccagcaunn

SEQ ID NO: 2856 - RNA, 21 nt, Artificial Sequence
  Description of Artificial Sequence:  siNA sense region
  misc_feature (1)..(1): 5'-3 attached terminal deoxyabasic moeity
  misc_feature (1)..(1): 2'-deoxy-2'-fluoro
  misc_feature (2)..(2): 2'-deoxy
  misc_feature (3)..(3): 2'-deoxy-2'-fluoro
  misc_feature (4)..(5): 2'-deoxy
  misc_feature (6)..(7): 2'-deoxy-2'-fluoro
  misc_feature (8)..(8): 2'-deoxy
  misc_feature (9)..(10): 2'-deoxy-2'-fluoro
  misc_feature (11)..(13): 2'-deoxy
  misc_feature (14)..(15): 2'-deoxy-2'-fluoro
  misc_feature (16)..(16): 2'-deoxy
  misc_feature (17)..(17): 2'-deoxy-2'-fluoro
  misc_feature (18)..(18): 2'-deoxy
  misc_feature (19)..(19): 2'-deoxy-2'-fluoro
  misc_feature (20)..(21): n stands for thymidine
  misc_feature (21)..(21): 3'-3 attached terminal deoxyabasic moeity
cacggucgucaggucguacnn

SEQ ID NO: 2857 - RNA, 21 nt, Artificial Sequence
  Description of Artificial Sequence:  siNA sense region
  misc_feature (1)..(1): 5'-3 attached terminal deoxyabasic moeity
  misc_feature (1)..(1): 2'-deoxy
  misc_feature (2)..(2): 2'-deoxy-2'-fluoro
  misc_feature (3)..(3): 2'-deoxy
  misc_feature (4)..(4): 2'-deoxy-2'-fluoro
  misc_feature (5)..(6): 2'-deoxy
  misc_feature (7)..(8): 2'-deoxy-2'-fluoro
  misc_feature (9)..(9): 2'-deoxy
  misc_feature (10)..(11): 2'-deoxy-2'-fluoro
  misc_feature (12)..(14): 2'-deoxy
  misc_feature (15)..(16): 2'-deoxy-2'-fluoro
  misc_feature (17)..(17): 2'-deoxy
  misc_feature (18)..(18): 2'-deoxy-2'-fluoro
  misc_feature (19)..(19): 2'-deoxy
  misc_feature (20)..(21): n stands for thymidine
  misc_feature (21)..(21): 3'-3 attached terminal deoxyabasic moeity
acacggucgucaggucguann

SEQ ID NO: 2858 - RNA, 21 nt, Artificial Sequence
  Description of Artificial Sequence:  siNA antisense region
  misc_feature (1)..(1): 2'-O-methyl
  misc_feature (2)..(2): 2'-deoxy-2'-fluoro
  misc_feature (3)..(3): 2'-O-methyl
  misc_feature (4)..(4): 2'-deoxy-2'-fluoro
  misc_feature (5)..(6): 2'-O-methyl
  misc_feature (7)..(9): 2'-deoxy-2'-fluoro
  misc_feature (10)..(11): 2'-O-methyl
  misc_feature (12)..(12): 2'-deoxy-2'-fluoro
  misc_feature (13)..(14): 2'-O-methyl
  misc_feature (15)..(16): 2'-deoxy-2'-fluoro
  misc_feature (17)..(17): 2'-O-methyl
  misc_feature (18)..(18): 2'-deoxy-2'-fluoro
  misc_feature (19)..(19): 2'-O-methyl
  misc_feature (20)..(20): Phosphorothioate 3'-Internucleotide Linkage
  misc_feature (20)..(21): n stands for thymidine
guacgaccugacgaccgugnn

SEQ ID NO: 2859 - RNA, 21 nt, Artificial Sequence
  Description of Artificial Sequence:  siNA antisense region
  misc_feature (1)..(1): 2'-deoxy-2'-fluoro
  misc_feature (2)..(2): 2'-O-methyl
  misc_feature (3)..(3): 2'-deoxy-2'-fluoro
  misc_feature (4)..(5): 2'-O-methyl
  misc_feature (6)..(8): 2'-deoxy-2'-fluoro
  misc_feature (9)..(10): 2'-O-methyl
  misc_feature (11)..(11): 2'-deoxy-2'-fluoro
  misc_feature (12)..(13): 2'-O-methyl
  misc_feature (14)..(15): 2'-deoxy-2'-fluoro
  misc_feature (16)..(16): 2'-O-methyl
  misc_feature (17)..(17): 2'-deoxy-2'-fluoro
  misc_feature (18)..(18): 2'-O-methyl
  misc_feature (19)..(19): 2'-deoxy-2'-fluoro
  misc_feature (20)..(20): Phosphorothioate 3'-Internucleotide Linkage
  misc_feature (20)..(21): n stands for L-thymidine
uacgaccugacgaccgugunn

SEQ ID NO: 2860 - RNA, 21 nt, Artificial Sequence
  Description of Artificial Sequence:  siNA sense region
  misc_feature (1)..(1): 5'-3 attached terminal deoxyabasic moeity
  misc_feature (21)..(21): 3'-3 attached terminal deoxyabasic moeity
  misc_feature (20)..(21): n stands for thymidine
cacggucgucaggucguacnn

SEQ ID NO: 2861 - RNA, 21 nt, Artificial Sequence
  Description of Artificial Sequence:  siNA sense region
  misc_feature (1)..(1): 5'-3 attached terminal deoxyabasic moeity
  misc_feature (21)..(21): 3'-3 attached terminal deoxyabasic moeity
  misc_feature (20)..(21): n stands for thymidine
acacggucgucaggucguann

SEQ ID NO: 2862 - RNA, 21 nt, Artificial Sequence
  Description of Artificial Sequence:  siNA antisense region
  misc_feature (20)..(20): Phosphorothioate 3'-Internucleotide Linkage
  misc_feature (20)..(21): n stands for thymidine
guacgaccugacgaccgugnn

SEQ ID NO: 2863 - RNA, 21 nt, Artificial Sequence
  Description of Artificial Sequence:  siNA antisense region
  misc_feature (20)..(20): Phosphorothioate 3'-Internucleotide Linkage
  misc_feature (20)..(21): n stands for thymidine
uacgaccugacgaccgugunn

SEQ ID NO: 2864 - RNA, 21 nt, Artificial Sequence
  Description of Artificial Sequence:  siNA sense region
  misc_feature (1)..(1): 5'-3 attached terminal deoxyabasic moeity
  misc_feature (1)..(2): Phosphorothioate 3'-Internucleotide Linkage
  misc_feature (8)..(12): Phosphorothioate 3'-Internucleotide Linkage
  misc_feature (18)..(20): Phosphorothioate 3'-Internucleotide Linkage
  misc_feature (20)..(21): n stands for thymidine
  misc_feature (21)..(21): 3'-3 attached terminal deoxyabasic moeity
cugaguuuaaaaggcacccnn

SEQ ID NO: 2865 - RNA, 21 nt, Artificial Sequence
  Description of Artificial Sequence:  siNA antisense region
  misc_feature (3)..(7): Phosphorothioate 3'-Internucleotide Linkage
  misc_feature (13)..(17): Phosphorothioate 3'-Internucleotide Linkage
  misc_feature (20)..(21): n stands for thymidine
  misc_feature (20)..(21): Phosphorothioate 3'-Internucleotide Linkage
gggugccuuuuaaacucagnn

SEQ ID NO: 2866 - RNA, 21 nt, Artificial Sequence
  Description of Artificial Sequence:  siNA sense region
  misc_feature (1)..(2): Phosphorothioate 3'-Internucleotide Linkage
  misc_feature (1)..(1): 5'-3 attached terminal deoxyabasic moeity
  misc_feature (8)..(12): Phosphorothioate 3'-Internucleotide Linkage
  misc_feature (18)..(20): Phosphorothioate 3'-Internucleotide Linkage
  misc_feature (20)..(21): n stands for thymidine
  misc_feature (21)..(21): 3'-3 attached terminal deoxyabasic moeity
cccacggaaaauuugagucnn

SEQ ID NO: 2867 - RNA, 21 nt, Artificial Sequence
  Description of Artificial Sequence:  siNA antisense region
  misc_feature (3)..(7): Phosphorothioate 3'-Internucleotide Linkage
  misc_feature (13)..(17): Phosphorothioate 3'-Internucleotide Linkage
  misc_feature (20)..(21): n stands for thymidine
  misc_feature (20)..(20): Phosphorothioate 3'-Internucleotide Linkage
gacucaaauuuuccgugggnn

SEQ ID NO: 2868 - RNA, 21 nt, Artificial Sequence
  Description of Artificial Sequence:  siNA sense region
  misc_feature (1)..(5): Phosphorothioate 3'-Internucleotide Linkage
  misc_feature (20)..(20): Phosphorothioate 3'-Internucleotide Linkage
  misc_feature (21)..(21): n stands for thymidine
cugaguuuaaaaggcacccnn

SEQ ID NO: 2869 - RNA, 21 nt, Artificial Sequence
  Description of Artificial Sequence:  siNA sense region
  misc_feature (1)..(5): Phosphorothioate 3'-Internucleotide Linkage
  misc_feature (20)..(20): Phosphorothioate 3'-Internucleotide Linkage
  misc_feature (21)..(21): n stands for thymidine
caaccacaaaauacaacaann

SEQ ID NO: 2870 - RNA, 21 nt, Artificial Sequence
  Description of Artificial Sequence:  siNA sense region
  misc_feature (1)..(5): Phosphorothioate 3'-Internucleotide Linkage
  misc_feature (20)..(20): Phosphorothioate 3'-Internucleotide Linkage
  misc_feature (21)..(21): n stands for thymidine
ccuggaaagaaucaaaaccnn

SEQ ID NO: 2871 - RNA, 21 nt, Artificial Sequence
  Description of Artificial Sequence:  siNA sense region
  misc_feature (1)..(5): Phosphorothioate 3'-Internucleotide Linkage
  misc_feature (20)..(20): Phosphorothioate 3'-Internucleotide Linkage
  misc_feature (21)..(21): n stands for thymidine
gcaaggagggccucugaugnn

SEQ ID NO: 2872 - RNA, 21 nt, Artificial Sequence
  Description of Artificial Sequence:  siNA antisense region
  misc_feature (1)..(5): Phosphorothioate 3'-Internucleotide Linkage
  misc_feature (20)..(20): Phosphorothioate 3'-Internucleotide Linkage
  misc_feature (21)..(21): n stands for thymidine
gggugccuuuuaaacucagnn

SEQ ID NO: 2873 - RNA, 21 nt, Artificial Sequence
  Description of Artificial Sequence:  siNA antisense region
  misc_feature (1)..(5): Phosphorothioate 3'-Internucleotide Linkage
  misc_feature (20)..(20): Phosphorothioate 3'-Internucleotide Linkage
  misc_feature (21)..(21): n stands for thymidine
uuguuguauuuugugguugnn

SEQ ID NO: 2874 - RNA, 21 nt, Artificial Sequence
  Description of Artificial Sequence:  siNA antisense region
  misc_feature (1)..(5): Phosphorothioate 3'-Internucleotide Linkage
  misc_feature (20)..(20): Phosphorothioate 3'-Internucleotide Linkage
  misc_feature (21)..(21): n stands for thymidine
gguuuugauucuuuccaggnn

SEQ ID NO: 2875 - RNA, 21 nt, Artificial Sequence
  Description of Artificial Sequence:  siNA antisense region
  misc_feature (1)..(5): Phosphorothioate 3'-Internucleotide Linkage
  misc_feature (20)..(20): Phosphorothioate 3'-Internucleotide Linkage
  misc_feature (21)..(21): n stands for thymidine
caucagaggcccuccuugcnn

SEQ ID NO: 2876 - RNA, 21 nt, Artificial Sequence
  Description of Artificial Sequence:  siNA sense region
  misc_feature (1)..(4): Phosphorothioate 3'-Internucleotide Linkage
  misc_feature (1)..(2): 2'-deoxy-2'-fluoro
  misc_feature (6)..(8): 2'-deoxy-2'-fluoro
  misc_feature (15)..(15): 2'-deoxy-2'-fluoro
  misc_feature (17)..(19): 2'-deoxy-2'-fluoro
  misc_feature (17)..(20): Phosphorothioate 3'-Internucleotide Linkage
  misc_feature (21)..(21): n stands for thymidine
cugaguuuaaaaggcacccnn

SEQ ID NO: 2877 - RNA, 21 nt, Artificial Sequence
  Description of Artificial Sequence:  siNA sense region
  misc_feature (1)..(4): Phosphorothioate 3'-Internucleotide Linkage
  misc_feature (1)..(1): 2'-deoxy-2'-fluoro
  misc_feature (4)..(5): 2'-deoxy-2'-fluoro
  misc_feature (7)..(7): 2'-deoxy-2'-fluoro
  misc_feature (12)..(12): 2'-deoxy-2'-fluoro
  misc_feature (14)..(14): 2'-deoxy-2'-fluoro
  misc_feature (17)..(17): 2'-deoxy-2'-fluoro
  misc_feature (17)..(20): Phosphorothioate 3'-Internucleotide Linkage
  misc_feature (21)..(21): n stands for thymidine
caaccacaaaauacaacaann

SEQ ID NO: 2878 - RNA, 21 nt, Artificial Sequence
  Description of Artificial Sequence:  siNA sense region
  misc_feature (1)..(4): Phosphorothioate 3'-Internucleotide Linkage
  misc_feature (1)..(3): 2'-deoxy-2'-fluoro
  misc_feature (12)..(13): 2'-deoxy-2'-fluoro
  misc_feature (17)..(20): Phosphorothioate 3'-Internucleotide Linkage
  misc_feature (18)..(19): 2'-deoxy-2'-fluoro
  misc_feature (21)..(21): n stands for thymidine
ccuggaaagaaucaaaaccnn

SEQ ID NO: 2879 - RNA, 21 nt, Artificial Sequence
  Description of Artificial Sequence:  siNA sense region
  misc_feature (1)..(4): Phosphorothioate 3'-Internucleotide Linkage
  misc_feature (2)..(2): 2'-deoxy-2'-fluoro
  misc_feature (11)..(15): 2'-deoxy-2'-fluoro
  misc_feature (17)..(20): Phosphorothioate 3'-Internucleotide Linkage
  misc_feature (18)..(18): 2'-deoxy-2'-fluoro
  misc_feature (21)..(21): n stands for thymidine
gcaaggagggccucugaugnn

SEQ ID NO: 2880 - RNA, 21 nt, Artificial Sequence
  Description of Artificial Sequence:  siNA antisense region
  misc_feature (1)..(20): Phosphorothioate 3'-Internucleotide Linkage
  misc_feature (21)..(21): n stands for thymidine
gggugccuuuuaaacucagnn

SEQ ID NO: 2881 - RNA, 21 nt, Artificial Sequence
  Description of Artificial Sequence:  siNA antisense region
  misc_feature (1)..(20): Phosphorothioate 3'-Internucleotide Linkage
  misc_feature (21)..(21): n stands for thymidine
uuguuguauuuugugguugnn

SEQ ID NO: 2882 - RNA, 21 nt, Artificial Sequence
  Description of Artificial Sequence:  siNA antisense region
  misc_feature (1)..(20): Phosphorothioate 3'-Internucleotide Linkage
  misc_feature (21)..(21): n stands for thymidine
gguuuugauucuuuccaggnn

SEQ ID NO: 2883 - RNA, 21 nt, Artificial Sequence
  Description of Artificial Sequence:  siNA antisense region
  misc_feature (1)..(20): Phosphorothioate 3'-Internucleotide Linkage
  misc_feature (21)..(21): n stands for thymidine
caucagaggcccuccuugcnn

SEQ ID NO: 2884 - RNA, 21 nt, Artificial Sequence
  Description of Artificial Sequence:  siNA sense region
caaccacaaaauacaacaaga

SEQ ID NO: 2885 - RNA, 21 nt, Artificial Sequence
  Description of Artificial Sequence:  siNA antisense region
uuguuguauuuugugguuguu

SEQ ID NO: 2886 - RNA, 21 nt, Artificial Sequence
  Description of Artificial Sequence:  siNA sense region
  misc_feature (1)..(5): Phosphorothioate 3'-Internucleotide Linkage
  misc_feature (20)..(20): Phosphorothioate 3'-Internucleotide Linkage
  misc_feature (21)..(21): n stands for thymidine
aacaacauaaaacaccaacnn

SEQ ID NO: 2887 - RNA, 21 nt, Artificial Sequence
  Description of Artificial Sequence:  siNA antisense region
  misc_feature (1)..(5): Phosphorothioate 3'-Internucleotide Linkage
  misc_feature (20)..(20): Phosphorothioate 3'-Internucleotide Linkage
  misc_feature (21)..(21): n stands for thymidine
guugguguuuuauguuguunn

SEQ ID NO: 2888 - RNA, 21 nt, Artificial Sequence
  Description of Artificial Sequence:  siNA sense region
  misc_feature (1)..(4): Phosphorothioate 3'-Internucleotide Linkage
  misc_feature (3)..(3): 2'-deoxy-2'-fluoro
  misc_feature (6)..(6): 2'-deoxy-2'-fluoro
  misc_feature (8)..(8): 2'-deoxy-2'-fluoro
  misc_feature (13)..(13): 2'-deoxy-2'-fluoro
  misc_feature (15)..(16): 2'-deoxy-2'-fluoro
  misc_feature (17)..(20): Phosphorothioate 3'-Internucleotide Linkage
  misc_feature (19)..(19): 2'-deoxy-2'-fluoro
  misc_feature (21)..(21): n stands for thymidine
aacaacauaaaacaccaacnn

SEQ ID NO: 2889 - RNA, 21 nt, Artificial Sequence
  Description of Artificial Sequence:  siNA antisense region
  misc_feature (1)..(20): Phosphorothioate 3'-Internucleotide Linkage
  misc_feature (21)..(21): n stands for thymidine
guugguguuuuauguuguunn

SEQ ID NO: 2890 - RNA, 21 nt, Artificial Sequence
  Description of Artificial Sequence:  siNA sense region
agaacaacauaaaacaccaac

SEQ ID NO: 2891 - RNA, 21 nt, Artificial Sequence
  Description of Artificial Sequence:  siNA antisense region
uuguugguguuuuauguuguu

SEQ ID NO: 2892 - RNA, 21 nt, Artificial Sequence
  Description of Artificial Sequence:  siNA sense region
  misc_feature (20)..(21): n stands for thymidine
caaccacaaaauacaacaann

SEQ ID NO: 2893 - RNA, 21 nt, Artificial Sequence
  Description of Artificial Sequence:  siNA antisense region
  misc_feature (20)..(21): n stands for thymidine
uuguuguauuuugugguugnn

SEQ ID NO: 2894 - RNA, 21 nt, Artificial Sequence
  Description of Artificial Sequence:  siNA sense region
  misc_feature (20)..(21): n stands for thymidine
agaacaacauaaaacaccann

SEQ ID NO: 2895 - RNA, 21 nt, Artificial Sequence
  Description of Artificial Sequence:  siNA antisense region
  misc_feature (20)..(21): n stands for thymidine
uuguugguguuuuauguugnn

SEQ ID NO: 2896 - RNA, 21 nt, Artificial Sequence
  Description of Artificial Sequence:  siNA antisense region
  misc_feature (1)..(2): 2'-deoxy-2'-fluoro
  misc_feature (4)..(5): 2'-deoxy-2'-fluoro
  misc_feature (7)..(7): 2'-deoxy-2'-fluoro
  misc_feature (9)..(12): 2'-deoxy-2'-fluoro
  misc_feature (14)..(14): 2'-deoxy-2'-fluoro
  misc_feature (17)..(18): 2'-deoxy-2'-fluoro
  misc_feature (20)..(21): n stands for thymidine
uuguuguauuuugugguugnn

SEQ ID NO: 2897 - RNA, 21 nt, Artificial Sequence
  Description of Artificial Sequence:  siNA antisense region
  misc_feature (1)..(2): 2'-deoxy-2'-fluoro
  misc_feature (4)..(5): 2'-deoxy-2'-fluoro
  misc_feature (7)..(7): 2'-deoxy-2'-fluoro
  misc_feature (9)..(12): 2'-deoxy-2'-fluoro
  misc_feature (14)..(14): 2'-deoxy-2'-fluoro
  misc_feature (17)..(18): 2'-deoxy-2'-fluoro
  misc_feature (20)..(21): nitroindole
uuguuguauuuugugguugnn

SEQ ID NO: 2898 - RNA, 21 nt, Artificial Sequence
  Description of Artificial Sequence:  siNA antisense region
  misc_feature (1)..(2): 2'-deoxy-2'-fluoro
  misc_feature (4)..(5): 2'-deoxy-2'-fluoro
  misc_feature (7)..(7): 2'-deoxy-2'-fluoro
  misc_feature (9)..(12): 2'-deoxy-2'-fluoro
  misc_feature (14)..(14): 2'-deoxy-2'-fluoro
  misc_feature (17)..(18): 2'-deoxy-2'-fluoro
  misc_feature (20)..(21): nitropyrrole
uuguuguauuuugugguugnn

SEQ ID NO: 2899 - RNA, 21 nt, Artificial Sequence
  Description of Artificial Sequence:  siNA sense region
  misc_feature (1)..(1): 2'-deoxy-2'-fluoro
  misc_feature (1)..(1): 5'-3 attached terminal deoxyabasic moeity
  misc_feature (4)..(5): 2'-deoxy-2'-fluoro
  misc_feature (7)..(7): 2'-deoxy-2'-fluoro
  misc_feature (12)..(12): 2'-deoxy-2'-fluoro
  misc_feature (14)..(14): 2'-deoxy-2'-fluoro
  misc_feature (17)..(17): 2'-deoxy-2'-fluoro
  misc_feature (20)..(20): n stands for thymidine
  misc_feature (21)..(21): 3'-3 attached terminal deoxyabasic moeity
caaccacaaaauacaacaann

SEQ ID NO: 2900 - RNA, 21 nt, Artificial Sequence
  Description of Artificial Sequence:  siNA sense region
  misc_feature (1)..(1): 2'-deoxy-2'-fluoro
  misc_feature (4)..(5): 2'-deoxy-2'-fluoro
  misc_feature (7)..(7): 2'-deoxy-2'-fluoro
  misc_feature (12)..(12): 2'-deoxy-2'-fluoro
  misc_feature (14)..(14): 2'-deoxy-2'-fluoro
  misc_feature (17)..(17): 2'-deoxy-2'-fluoro
  misc_feature (20)..(21): n stands for thymidine
caaccacaaaauacaacaann

SEQ ID NO: 2901 - RNA, 21 nt, Artificial Sequence
  Description of Artificial Sequence:  siNA antisense region
  misc_feature (1)..(2): 2'-deoxy-2'-fluoro
  misc_feature (4)..(5): 2'-deoxy-2'-fluoro
  misc_feature (7)..(7): 2'-deoxy-2'-fluoro
  misc_feature (9)..(12): 2'-deoxy-2'-fluoro
  misc_feature (14)..(14): 2'-deoxy-2'-fluoro
  misc_feature (17)..(18): 2'-deoxy-2'-fluoro
  misc_feature (20)..(20): n stands for thymidine
  misc_feature (21)..(21): 3'-deoxy T
uuguuguauuuugugguugnn

SEQ ID NO: 2902 - RNA, 22 nt, Artificial Sequence
  Description of Artificial Sequence:  siNA antisense region
  misc_feature (1)..(2): 2'-deoxy-2'-fluoro
  misc_feature (4)..(5): 2'-deoxy-2'-fluoro
  misc_feature (7)..(7): 2'-deoxy-2'-fluoro
  misc_feature (9)..(12): 2'-deoxy-2'-fluoro
  misc_feature (14)..(14): 2'-deoxy-2'-fluoro
  misc_feature (17)..(18): 2'-deoxy-2'-fluoro
  misc_feature (20)..(20): n stands for thymidine
  misc_feature (21)..(21): glyceryl
  misc_feature (22)..(22): n stands for thymidine
uuguuguauuuugugguugngn

SEQ ID NO: 2903 - RNA, 21 nt, Artificial Sequence
  Description of Artificial Sequence:  siNA antisense region
  misc_feature (1)..(2): 2'-deoxy-2'-fluoro
  misc_feature (4)..(5): 2'-deoxy-2'-fluoro
  misc_feature (7)..(7): 2'-deoxy-2'-fluoro
  misc_feature (9)..(12): 2'-deoxy-2'-fluoro
  misc_feature (14)..(14): 2'-deoxy-2'-fluoro
  misc_feature (17)..(18): 2'-deoxy-2'-fluoro
  misc_feature (20)..(20): n stands for thymidine
  misc_feature (21)..(21): 3'-O-Methyl Uridine
uuguuguauuuugugguugnu

SEQ ID NO: 2904 - RNA, 21 nt, Artificial Sequence
  Description of Artificial Sequence:  siNA antisense region
  misc_feature (1)..(2): 2'-deoxy-2'-fluoro
  misc_feature (4)..(5): 2'-deoxy-2'-fluoro
  misc_feature (7)..(7): 2'-deoxy-2'-fluoro
  misc_feature (9)..(12): 2'-deoxy-2'-fluoro
  misc_feature (14)..(14): 2'-deoxy-2'-fluoro
  misc_feature (17)..(18): 2'-deoxy-2'-fluoro
  misc_feature (20)..(20): n stands for thymidine
  misc_feature (21)..(21): L-thymidine
uuguuguauuuugugguugnn

SEQ ID NO: 2905 - RNA, 21 nt, Artificial Sequence
  Description of Artificial Sequence:  siNA antisense region
  misc_feature (1)..(2): 2'-deoxy-2'-fluoro
  misc_feature (4)..(5): 2'-deoxy-2'-fluoro
  misc_feature (7)..(7): 2'-deoxy-2'-fluoro
  misc_feature (9)..(12): 2'-deoxy-2'-fluoro
  misc_feature (14)..(14): 2'-deoxy-2'-fluoro
  misc_feature (17)..(18): 2'-deoxy-2'-fluoro
  misc_feature (20)..(20): n stands for thymidine
  misc_feature (21)..(21): L uridine
uuguuguauuuugugguugnu

SEQ ID NO: 2906 - RNA, 21 nt, Artificial Sequence
  Description of Artificial Sequence:  siNA antisense region
  misc_feature (1)..(2): 2'-deoxy-2'-fluoro
  misc_feature (4)..(5): 2'-deoxy-2'-fluoro
  misc_feature (7)..(7): 2'-deoxy-2'-fluoro
  misc_feature (9)..(12): 2'-deoxy-2'-fluoro
  misc_feature (14)..(14): 2'-deoxy-2'-fluoro
  misc_feature (17)..(18): 2'-deoxy-2'-fluoro
  misc_feature (20)..(20): n stands for thymidine
  misc_feature (21)..(21): inverted thymidine
uuguuguauuuugugguugnn

SEQ ID NO: 2907 - RNA, 21 nt, Artificial Sequence
  Description of Artificial Sequence:  siNA antisense region
  misc_feature (1)..(2): 2'-deoxy-2'-fluoro
  misc_feature (4)..(5): 2'-deoxy-2'-fluoro
  misc_feature (7)..(7): 2'-deoxy-2'-fluoro
  misc_feature (9)..(12): 2'-deoxy-2'-fluoro
  misc_feature (14)..(14): 2'-deoxy-2'-fluoro
  misc_feature (17)..(18): 2'-deoxy-2'-fluoro
  misc_feature (20)..(20): 3'-deoxy T
  misc_feature (21)..(21): n stands for thymidine
uuguuguauuuugugguugnn

SEQ ID NO: 2908 - RNA, 21 nt, Artificial Sequence
  Description of Artificial Sequence:  siNA antisense region
  misc_feature (1)..(2): 2'-deoxy-2'-fluoro
  misc_feature (4)..(5): 2'-deoxy-2'-fluoro
  misc_feature (7)..(7): 2'-deoxy-2'-fluoro
  misc_feature (9)..(12): 2'-deoxy-2'-fluoro
  misc_feature (14)..(14): 2'-deoxy-2'-fluoro
  misc_feature (17)..(18): 2'-deoxy-2'-fluoro
  misc_feature (20)..(20): Phosphorothioate 3'-Internucleotide Linkage
  misc_feature (21)..(21): n stands for thymidine
uuguuguauuuugugguugnn

SEQ ID NO: 2909 - RNA, 21 nt, Artificial Sequence
  Description of Artificial Sequence:  siNA sense region
  misc_feature (1)..(1): 5'-3 attached terminal deoxyabasic moeity
  misc_feature (2)..(2): Phosphorothioate 3'-Internucleotide Linkage
  misc_feature (4)..(4): Phosphorothioate 3'-Internucleotide Linkage
  misc_feature (11)..(11): Phosphorothioate 3'-Internucleotide Linkage
  misc_feature (15)..(16): Phosphorothioate 3'-Internucleotide Linkage
  misc_feature (18)..(19): Phosphorothioate 3'-Internucleotide Linkage
  misc_feature (20)..(20): n stands for thymidine
  misc_feature (21)..(21): 3'-3 attached terminal deoxyabasic moeity
guguaaggaguggaccaucnn

SEQ ID NO: 2910 - RNA, 21 nt, Artificial Sequence
  Description of Artificial Sequence:  siNA sense region
  misc_feature (1)..(1): 5'-3 attached terminal deoxyabasic moeity
  misc_feature (2)..(2): 2'-deoxy-2'-fluoro
  misc_feature (7)..(7): 2'-deoxy-2'-fluoro
  misc_feature (9)..(10): 2'-deoxy-2'-fluoro
  misc_feature (12)..(13): 2'-deoxy-2'-fluoro
  misc_feature (15)..(15): 2'-deoxy-2'-fluoro
  misc_feature (20)..(20): n stands for thymidine
  misc_feature (21)..(21): 3'-3 attached terminal deoxyabasic moeity
acggaguauugcugugggann

SEQ ID NO: 2911 - RNA, 21 nt, Artificial Sequence
  Description of Artificial Sequence:  siNA sense region
  misc_feature (1)..(1): 5'-3 attached terminal deoxyabasic moeity
  misc_feature (2)..(2): 2'-deoxy-2'-fluoro
  misc_feature (6)..(8): 2'-deoxy-2'-fluoro
  misc_feature (13)..(13): 2'-deoxy-2'-fluoro
  misc_feature (15)..(15): 2'-deoxy-2'-fluoro
  misc_feature (17)..(17): 2'-deoxy-2'-fluoro
  misc_feature (20)..(20): n stands for thymidine
  misc_feature (21)..(21): 3'-3 attached terminal deoxyabasic moeity
gcaggccuaagacaugugann

SEQ ID NO: 2912 - RNA, 21 nt, Artificial Sequence
  Description of Artificial Sequence:  siNA sense region
  misc_feature (1)..(1): 5'-3 attached terminal deoxyabasic moeity
  misc_feature (1)..(1): 2'-deoxy-2'-fluoro
  misc_feature (8)..(8): 2'-deoxy-2'-fluoro
  misc_feature (20)..(20): n stands for thymidine
  misc_feature (21)..(21): 3'-3 attached terminal deoxyabasic moeity
caaaaagcaagggagaaaann

SEQ ID NO: 2913 - RNA, 21 nt, Artificial Sequence
  Description of Artificial Sequence:  siNA antisense region
  misc_feature (3)..(3): 2'-deoxy-2'-fluoro
  misc_feature (6)..(8): 2'-deoxy-2'-fluoro
  misc_feature (10)..(15): 2'-deoxy-2'-fluoro
  misc_feature (17)..(17): 2'-deoxy-2'-fluoro
  misc_feature (19)..(19): 2'-deoxy-2'-fluoro
  misc_feature (20)..(20): Phosphorothioate 3'-Internucleotide Linkage
  misc_feature (21)..(21): n stands for thymidine
gaugguccacuccuuacacnn

SEQ ID NO: 2914 - RNA, 21 nt, Artificial Sequence
  Description of Artificial Sequence:  siNA antisense region
  misc_feature (1)..(4): 2'-deoxy-2'-fluoro
  misc_feature (6)..(6): 2'-deoxy-2'-fluoro
  misc_feature (9)..(9): 2'-deoxy-2'-fluoro
  misc_feature (12)..(12): 2'-deoxy-2'-fluoro
  misc_feature (14)..(17): 2'-deoxy-2'-fluoro
  misc_feature (19)..(19): 2'-deoxy-2'-fluoro
  misc_feature (20)..(20): Phosphorothioate 3'-Internucleotide Linkage
  misc_feature (21)..(21): n stands for thymidine
ucccacagcaauacuccgunn

SEQ ID NO: 2915 - RNA, 21 nt, Artificial Sequence
  Description of Artificial Sequence:  siNA antisense region
  misc_feature (1)..(2): 2'-deoxy-2'-fluoro
  misc_feature (4)..(4): 2'-deoxy-2'-fluoro
  misc_feature (6)..(6): 2'-deoxy-2'-fluoro
  misc_feature (8)..(11): 2'-deoxy-2'-fluoro
  misc_feature (15)..(17): 2'-deoxy-2'-fluoro
  misc_feature (19)..(19): 2'-deoxy-2'-fluoro
  misc_feature (20)..(20): Phosphorothioate 3'-Internucleotide Linkage
  misc_feature (21)..(21): n stands for thymidine
ucacaugucuuaggccugcnn

SEQ ID NO: 2916 - RNA, 21 nt, Artificial Sequence
  Description of Artificial Sequence:  siNA antisense region
  misc_feature (1)..(11): 2'-deoxy-2'-fluoro
  misc_feature (13)..(18): 2'-deoxy-2'-fluoro
  misc_feature (20)..(20): Phosphorothioate 3'-Internucleotide Linkage
  misc_feature (21)..(21): n stands for thymidine
uuuucucccuugcuuuuugnn

SEQ ID NO: 2917 - RNA, 21 nt, Artificial Sequence
  Description of Artificial Sequence:  siNA sense region
  misc_feature (1)..(1): 2'-deoxy-2'-fluoro
  misc_feature (1)..(1): 5'-3 attached terminal deoxyabasic moeity
  misc_feature (2)..(3): 2'-deoxy
  misc_feature (4)..(5): 2'-deoxy-2'-fluoro
  misc_feature (6)..(6): 2'-deoxy
  misc_feature (7)..(7): 2'-deoxy-2'-fluoro
  misc_feature (8)..(11): 2'-deoxy
  misc_feature (12)..(12): 2'-deoxy-2'-fluoro
  misc_feature (13)..(13): 2'-deoxy
  misc_feature (14)..(14): 2'-deoxy-2'-fluoro
  misc_feature (15)..(16): 2'-deoxy
  misc_feature (17)..(17): 2'-deoxy-2'-fluoro
  misc_feature (18)..(19): 2'-deoxy
  misc_feature (20)..(20): n stands for thymidine
  misc_feature (21)..(21): 3'-3 attached terminal deoxyabasic moeity
caaccacaaaauacaacaann

SEQ ID NO: 2918 - RNA, 21 nt, Artificial Sequence
  Description of Artificial Sequence:  siNA antisense region
  misc_feature (1)..(2): 2'-deoxy-2'-fluoro
  misc_feature (3)..(3): 2'-O-methyl
  misc_feature (4)..(5): 2'-deoxy-2'-fluoro
  misc_feature (6)..(6): 2'-O-methyl
  misc_feature (7)..(7): 2'-deoxy-2'-fluoro
  misc_feature (8)..(8): 2'-O-methyl
  misc_feature (9)..(12): 2'-deoxy-2'-fluoro
  misc_feature (13)..(13): 2'-O-methyl
  misc_feature (14)..(14): 2'-deoxy-2'-fluoro
  misc_feature (15)..(16): 2'-O-methyl
  misc_feature (17)..(18): 2'-deoxy-2'-fluoro
  misc_feature (19)..(19): 2'-O-methyl
  misc_feature (20)..(20): Phosphorothioate 3'-Internucleotide Linkage
  misc_feature (21)..(21): n stands for thymidine
uuguuguauuuugugguugnn

SEQ ID NO: 2919 - RNA, 21 nt, Artificial Sequence
  Description of Artificial Sequence:  siNA sense region
  misc_feature (20)..(21): n stands for thymidine
aacaacauaaaacaccaacnn

SEQ ID NO: 2920 - RNA, 21 nt, Artificial Sequence
  Description of Artificial Sequence:  siNA antisense region
  misc_feature (20)..(21): n stands for thymidine
guugguguuuuauguuguunn

SEQ ID NO: 2921 - RNA, 21 nt, Artificial Sequence
  Description of Artificial Sequence:  siNA sense region
  misc_feature (1)..(1): 5'-3 attached terminal deoxyabasic moeity
  misc_feature (3)..(3): 2'-deoxy-2'-fluoro
  misc_feature (6)..(6): 2'-deoxy-2'-fluoro
  misc_feature (8)..(8): 2'-deoxy-2'-fluoro
  misc_feature (13)..(13): 2'-deoxy-2'-fluoro
  misc_feature (15)..(16): 2'-deoxy-2'-fluoro
  misc_feature (19)..(19): 2'-deoxy-2'-fluoro
  misc_feature (20)..(20): n stands for thymidine
  misc_feature (21)..(21): 3'-3 attached terminal deoxyabasic moeity
aacaacauaaaacaccaacnn

SEQ ID NO: 2922 - RNA, 21 nt, Artificial Sequence
  Description of Artificial Sequence:  siNA antisense region
  misc_feature (2)..(3): 2'-deoxy-2'-fluoro
  misc_feature (6)..(6): 2'-deoxy-2'-fluoro
  misc_feature (8)..(11): 2'-deoxy-2'-fluoro
  misc_feature (13)..(13): 2'-deoxy-2'-fluoro
  misc_feature (15)..(16): 2'-deoxy-2'-fluoro
  misc_feature (18)..(19): 2'-deoxy-2'-fluoro
  misc_feature (20)..(20): Phosphorothioate 3'-Internucleotide Linkage
  misc_feature (21)..(21): n stands for thymidine
guugguguuuuauguuguunn

SEQ ID NO: 2923 - RNA, 21 nt, Artificial Sequence
  Description of Artificial Sequence:  siNA sense region
  misc_feature (1)..(1): 5'-3 attached terminal deoxyabasic moeity
  misc_feature (1)..(2): 2'-deoxy
  misc_feature (3)..(3): 2'-deoxy-2'-fluoro
  misc_feature (4)..(5): 2'-deoxy
  misc_feature (6)..(6): 2'-deoxy-2'-fluoro
  misc_feature (7)..(7): 2'-deoxy
  misc_feature (8)..(8): 2'-deoxy-2'-fluoro
  misc_feature (9)..(12): 2'-deoxy
  misc_feature (13)..(13): 2'-deoxy-2'-fluoro
  misc_feature (14)..(14): 2'-deoxy
  misc_feature (15)..(16): 2'-deoxy-2'-fluoro
  misc_feature (17)..(18): 2'-deoxy
  misc_feature (19)..(19): 2'-deoxy-2'-fluoro
  misc_feature (20)..(20): n stands for thymidine
  misc_feature (21)..(21): 3'-3 attached terminal deoxyabasic moeity
aacaacauaaaacaccaacnn

SEQ ID NO: 2924 - RNA, 21 nt, Artificial Sequence
  Description of Artificial Sequence:  siNA antisense region
  misc_feature (2)..(3): 2'-deoxy-2'-fluoro
  misc_feature (6)..(6): 2'-deoxy-2'-fluoro
  misc_feature (8)..(11): 2'-deoxy-2'-fluoro
  misc_feature (13)..(13): 2'-deoxy-2'-fluoro
  misc_feature (15)..(16): 2'-deoxy-2'-fluoro
  misc_feature (18)..(19): 2'-deoxy-2'-fluoro
  misc_feature (20)..(20): Phosphorothioate 3'-Internucleotide Linkage
  misc_feature (21)..(21): n stands for thymidine
guugguguuuuauguuguunn

SEQ ID NO: 2925 - RNA, 21 nt, Artificial Sequence
  Description of Artificial Sequence:  siNA sense region
  misc_feature (20)..(21): n stands for thymidine
cugaguuuaaaaggcacccnn

SEQ ID NO: 2926 - RNA, 21 nt, Artificial Sequence
  Description of Artificial Sequence:  siNA sense region
  misc_feature (20)..(21): n stands for thymidine
gcaaggagggccucugaugnn

SEQ ID NO: 2927 - RNA, 21 nt, Artificial Sequence
  Description of Artificial Sequence:  siNA sense region
  misc_feature (20)..(21): n stands for thymidine
ccuggaaagaaucaaaaccnn

SEQ ID NO: 2928 - RNA, 21 nt, Artificial Sequence
  Description of Artificial Sequence:  siNA antisense region
  misc_feature (20)..(21): n stands for thymidine
gggugccuuuuaaacucagnn

SEQ ID NO: 2929 - RNA, 21 nt, Artificial Sequence
  Description of Artificial Sequence:  siNA antisense region
  misc_feature (20)..(21): n stands for thymidine
caucagaggcccuccuugcnn

SEQ ID NO: 2930 - RNA, 21 nt, Artificial Sequence
  Description of Artificial Sequence:  siNA antisense region
  misc_feature (20)..(21): n stands for thymidine
gguuuugauucuuuccaggnn

SEQ ID NO: 2931 - RNA, 21 nt, Artificial Sequence
  Description of Artificial Sequence:  siNA sense region
  misc_feature (1)..(2): 2'-deoxy-2'-fluoro
  misc_feature (1)..(1): 5'-3 attached terminal deoxyabasic moeity
  misc_feature (6)..(8): 2'-deoxy-2'-fluoro
  misc_feature (15)..(15): 2'-deoxy-2'-fluoro
  misc_feature (17)..(19): 2'-deoxy-2'-fluoro
  misc_feature (20)..(20): n stands for thymidine
  misc_feature (21)..(21): 3'-3 attached terminal deoxyabasic moeity
cugaguuuaaaaggcacccnn

SEQ ID NO: 2932 - RNA, 21 nt, Artificial Sequence
  Description of Artificial Sequence:  siNA sense region
  misc_feature (1)..(1): 5'-3 attached terminal deoxyabasic moeity
  misc_feature (2)..(2): 2'-deoxy-2'-fluoro
  misc_feature (11)..(15): 2'-deoxy-2'-fluoro
  misc_feature (18)..(18): 2'-deoxy-2'-fluoro
  misc_feature (20)..(20): n stands for thymidine
  misc_feature (21)..(21): 3'-3 attached terminal deoxyabasic moeity
gcaaggagggccucugaugnn

SEQ ID NO: 2933 - RNA, 21 nt, Artificial Sequence
  Description of Artificial Sequence:  siNA sense region
  misc_feature (1)..(3): 2'-deoxy-2'-fluoro
  misc_feature (1)..(1): 5'-3 attached terminal deoxyabasic moeity
  misc_feature (12)..(13): 2'-deoxy-2'-fluoro
  misc_feature (18)..(19): 2'-deoxy-2'-fluoro
  misc_feature (20)..(20): n stands for thymidine
  misc_feature (21)..(21): 3'-3 attached terminal deoxyabasic moeity
ccuggaaagaaucaaaaccnn

SEQ ID NO: 2934 - RNA, 21 nt, Artificial Sequence
  Description of Artificial Sequence:  siNA antisense region
  misc_feature (4)..(4): 2'-deoxy-2'-fluoro
  misc_feature (6)..(11): 2'-deoxy-2'-fluoro
  misc_feature (15)..(17): 2'-deoxy-2'-fluoro
  misc_feature (20)..(20): Phosphorothioate 3'-Internucleotide Linkage
  misc_feature (21)..(21): n stands for thymidine
gggugccuuuuaaacucagnn

SEQ ID NO: 2935 - RNA, 21 nt, Artificial Sequence
  Description of Artificial Sequence:  siNA antisense region
  misc_feature (1)..(1): 2'-deoxy-2'-fluoro
  misc_feature (3)..(4): 2'-deoxy-2'-fluoro
  misc_feature (10)..(17): 2'-deoxy-2'-fluoro
  misc_feature (19)..(19): 2'-deoxy-2'-fluoro
  misc_feature (20)..(20): Phosphorothioate 3'-Internucleotide Linkage
  misc_feature (21)..(21): n stands for thymidine
caucagaggcccuccuugcnn

SEQ ID NO: 2936 - RNA, 21 nt, Artificial Sequence
  Description of Artificial Sequence:  siNA antisense region
  misc_feature (3)..(6): 2'-deoxy-2'-fluoro
  misc_feature (9)..(16): 2'-deoxy-2'-fluoro
  misc_feature (20)..(20): Phosphorothioate 3'-Internucleotide Linkage
  misc_feature (21)..(21): n stands for thymidine
gguuuugauucuuuccaggnn

SEQ ID NO: 2937 - RNA, 21 nt, Artificial Sequence
  Description of Artificial Sequence:  siNA sense region
  misc_feature (1)..(1): 5'-3 attached terminal deoxyabasic moeity
  misc_feature (1)..(2): 2'-deoxy-2'-fluoro
  misc_feature (3)..(5): 2'-deoxy
  misc_feature (6)..(8): 2'-deoxy-2'-fluoro
  misc_feature (9)..(14): 2'-deoxy
  misc_feature (15)..(15): 2'-deoxy-2'-fluoro
  misc_feature (16)..(16): 2'-deoxy
  misc_feature (17)..(19): 2'-deoxy-2'-fluoro
  misc_feature (20)..(20): n stands for thymidine
  misc_feature (21)..(21): 3'-3 attached terminal deoxyabasic moeity
cugaguuuaaaaggcacccnn

SEQ ID NO: 2938 - RNA, 21 nt, Artificial Sequence
  Description of Artificial Sequence:  siNA sense region
  misc_feature (1)..(1): 2'-deoxy
  misc_feature (1)..(1): 5'-3 attached terminal deoxyabasic moeity
  misc_feature (2)..(2): 2'-deoxy-2'-fluoro
  misc_feature (3)..(10): 2'-deoxy
  misc_feature (11)..(15): 2'-deoxy-2'-fluoro
  misc_feature (16)..(17): 2'-deoxy
  misc_feature (18)..(18): 2'-deoxy-2'-fluoro
  misc_feature (19)..(19): 2'-deoxy
  misc_feature (20)..(20): n stands for thymidine
  misc_feature (21)..(21): 3'-3 attached terminal deoxyabasic moeity
gcaaggagggccucugaugnn

SEQ ID NO: 2939 - RNA, 21 nt, Artificial Sequence
  Description of Artificial Sequence:  siNA sense region
  misc_feature (1)..(3): 2'-deoxy-2'-fluoro
  misc_feature (1)..(1): 5'-3 attached terminal deoxyabasic moeity
  misc_feature (4)..(11): 2'-deoxy
  misc_feature (12)..(13): 2'-deoxy-2'-fluoro
  misc_feature (14)..(17): 2'-deoxy
  misc_feature (18)..(19): 2'-deoxy-2'-fluoro
  misc_feature (20)..(20): n stands for thymidine
  misc_feature (21)..(21): 3'-3 attached terminal deoxyabasic moeity
ccuggaaagaaucaaaaccnn

SEQ ID NO: 2940 - RNA, 21 nt, Artificial Sequence
  Description of Artificial Sequence:  siNA antisense region
  misc_feature (1)..(3): 2'-O-methyl
  misc_feature (4)..(4): 2'-deoxy-2'-fluoro
  misc_feature (5)..(5): 2'-O-methyl
  misc_feature (6)..(11): 2'-deoxy-2'-fluoro
  misc_feature (12)..(14): 2'-O-methyl
  misc_feature (15)..(17): 2'-deoxy-2'-fluoro
  misc_feature (18)..(19): 2'-O-methyl
  misc_feature (20)..(20): Phosphorothioate 3'-Internucleotide Linkage
  misc_feature (21)..(21): n stands for thymidine
gggugccuuuuaaacucagnn

SEQ ID NO: 2941 - RNA, 21 nt, Artificial Sequence
  Description of Artificial Sequence:  siNA antisense region
  misc_feature (1)..(1): 2'-deoxy-2'-fluoro
  misc_feature (2)..(2): 2'-O-methyl
  misc_feature (3)..(4): 2'-deoxy-2'-fluoro
  misc_feature (5)..(9): 2'-O-methyl
  misc_feature (10)..(17): 2'-deoxy-2'-fluoro
  misc_feature (18)..(18): 2'-O-methyl
  misc_feature (19)..(19): 2'-deoxy-2'-fluoro
  misc_feature (20)..(20): Phosphorothioate 3'-Internucleotide Linkage
  misc_feature (21)..(21): n stands for thymidine
caucagaggcccuccuugcnn

SEQ ID NO: 2942 - RNA, 21 nt, Artificial Sequence
  Description of Artificial Sequence:  siNA antisense region
  misc_feature (1)..(2): 2'-O-methyl
  misc_feature (3)..(6): 2'-deoxy-2'-fluoro
  misc_feature (7)..(8): 2'-O-methyl
  misc_feature (9)..(16): 2'-deoxy-2'-fluoro
  misc_feature (17)..(19): 2'-O-methyl
  misc_feature (20)..(20): Phosphorothioate 3'-Internucleotide Linkage
  misc_feature (21)..(21): n stands for thymidine
gguuuugauucuuuccaggnn

SEQ ID NO: 2943 - RNA, 21 nt, Artificial Sequence
  Description of Artificial Sequence:  siNA sense region
  misc_feature (20)..(21): n stands for thymidine
cccacggaaaauuugagucnn

SEQ ID NO: 2944 - RNA, 21 nt, Artificial Sequence
  Description of Artificial Sequence:  siNA sense region
  misc_feature (20)..(21): n stands for thymidine
guagucuccgggaggaacgnn

SEQ ID NO: 2945 - RNA, 21 nt, Artificial Sequence
  Description of Artificial Sequence:  siNA sense region
  misc_feature (20)..(21): n stands for thymidine
ccaaaacuaagaaagguccnn

SEQ ID NO: 2946 - RNA, 21 nt, Artificial Sequence
  Description of Artificial Sequence:  siNA antisense region
  misc_feature (20)..(21): n stands for thymidine
gacucaaauuuuccgugggnn

SEQ ID NO: 2947 - RNA, 21 nt, Artificial Sequence
  Description of Artificial Sequence:  siNA antisense region
  misc_feature (20)..(21): n stands for thymidine
cguuccucccggagacuacnn

SEQ ID NO: 2948 - RNA, 21 nt, Artificial Sequence
  Description of Artificial Sequence:  siNA antisense region
  misc_feature (20)..(21): n stands for thymidine
ggaccuuucuuaguuuuggnn

SEQ ID NO: 2949 - RNA, 21 nt, Artificial Sequence
  Description of Artificial Sequence:  siNA sense region
  misc_feature (1)..(1): 5'-3 attached terminal deoxyabasic moeity
  misc_feature (1)..(3): 2'-deoxy-2'-fluoro
  misc_feature (5)..(5): 2'-deoxy-2'-fluoro
  misc_feature (12)..(14): 2'-deoxy-2'-fluoro
  misc_feature (18)..(19): 2'-deoxy-2'-fluoro
  misc_feature (20)..(20): n stands for thymidine
  misc_feature (21)..(21): 3'-3 attached terminal deoxyabasic moeity
cccacggaaaauuugagucnn

SEQ ID NO: 2950 - RNA, 21 nt, Artificial Sequence
  Description of Artificial Sequence:  siNA sense region
  misc_feature (1)..(1): 5'-3 attached terminal deoxyabasic moeity
  misc_feature (2)..(2): 2'-deoxy-2'-fluoro
  misc_feature (5)..(9): 2'-deoxy-2'-fluoro
  misc_feature (18)..(18): 2'-deoxy-2'-fluoro
  misc_feature (20)..(20): n stands for thymidine
  misc_feature (21)..(21): 3'-3 attached terminal deoxyabasic moeity
guagucuccgggaggaacgnn

SEQ ID NO: 2951 - RNA, 21 nt, Artificial Sequence
  Description of Artificial Sequence:  siNA sense region
  misc_feature (1)..(1): 5'-3 attached terminal deoxyabasic moeity
  misc_feature (1)..(2): 2'-deoxy-2'-fluoro
  misc_feature (7)..(8): 2'-deoxy-2'-fluoro
  misc_feature (17)..(19): 2'-deoxy-2'-fluoro
  misc_feature (20)..(20): n stands for thymidine
  misc_feature (21)..(21): 3'-3 attached terminal deoxyabasic moeity
ccaaaacuaagaaagguccnn

SEQ ID NO: 2952 - RNA, 21 nt, Artificial Sequence
  Description of Artificial Sequence:  siNA antisense region
  misc_feature (1)..(1): 2'-deoxy-2'-fluoro
  misc_feature (2)..(2): 2'-deoxy
  misc_feature (3)..(4): 2'-deoxy-2'-fluoro
  misc_feature (5)..(9): 2'-deoxy
  misc_feature (10)..(17): 2'-deoxy-2'-fluoro
  misc_feature (18)..(18): 2'-deoxy
  misc_feature (19)..(19): 2'-deoxy-2'-fluoro
  misc_feature (20)..(20): Phosphorothioate 3'-Internucleotide Linkage
  misc_feature (21)..(21): n stands for thymidine
caucagaggcccuccuugcnn

SEQ ID NO: 2953 - RNA, 21 nt, Artificial Sequence
  Description of Artificial Sequence:  siNA antisense region
  misc_feature (1)..(3): 2'-deoxy
  misc_feature (4)..(4): 2'-deoxy-2'-fluoro
  misc_feature (5)..(5): 2'-deoxy
  misc_feature (6)..(11): 2'-deoxy-2'-fluoro
  misc_feature (12)..(14): 2'-deoxy
  misc_feature (15)..(17): 2'-deoxy-2'-fluoro
  misc_feature (18)..(19): 2'-deoxy
  misc_feature (20)..(20): Phosphorothioate 3'-Internucleotide Linkage
  misc_feature (21)..(21): n stands for thymidine
gggugccuuuuaaacucagnn

SEQ ID NO: 2954 - RNA, 21 nt, Artificial Sequence
  Description of Artificial Sequence:  siNA antisense region
  misc_feature (1)..(2): 2'-deoxy
  misc_feature (3)..(6): 2'-deoxy-2'-fluoro
  misc_feature (7)..(8): 2'-deoxy
  misc_feature (9)..(16): 2'-deoxy-2'-fluoro
  misc_feature (17)..(19): 2'-deoxy
  misc_feature (20)..(20): Phosphorothioate 3'-Internucleotide Linkage
  misc_feature (21)..(21): n stands for thymidine
gguuuugauucuuuccaggnn

SEQ ID NO: 2955 - RNA, 21 nt, Artificial Sequence
  Description of Artificial Sequence:  siNA antisense region
  misc_feature (1)..(1): 2'-deoxy
  misc_feature (2)..(3): 2'-deoxy-2'-fluoro
  misc_feature (4)..(5): 2'-deoxy
  misc_feature (6)..(6): 2'-deoxy-2'-fluoro
  misc_feature (7)..(7): 2'-deoxy
  misc_feature (8)..(11): 2'-deoxy-2'-fluoro
  misc_feature (12)..(12): 2'-deoxy
  misc_feature (13)..(13): 2'-deoxy-2'-fluoro
  misc_feature (14)..(14): 2'-deoxy
  misc_feature (15)..(16): 2'-deoxy-2'-fluoro
  misc_feature (17)..(17): 2'-deoxy
  misc_feature (18)..(19): 2'-deoxy-2'-fluoro
  misc_feature (20)..(20): Phosphorothioate 3'-Internucleotide Linkage
  misc_feature (21)..(21): n stands for thymidine
guugguguuuuauguuguunn

SEQ ID NO: 2956 - RNA, 21 nt, Artificial Sequence
  Description of Artificial Sequence:  siNA antisense region
  misc_feature (1)..(1): 2'-deoxy-2'-fluoro
  misc_feature (2)..(2): 2'-deoxy
  misc_feature (3)..(10): 2'-deoxy-2'-fluoro
  misc_feature (11)..(15): 2'-deoxy
  misc_feature (16)..(17): 2'-deoxy-2'-fluoro
  misc_feature (18)..(18): 2'-deoxy
  misc_feature (19)..(19): 2'-deoxy-2'-fluoro
  misc_feature (20)..(20): Phosphorothioate 3'-Internucleotide Linkage
  misc_feature (21)..(21): n stands for thymidine
cguuccucccggagacuacnn

SEQ ID NO: 2957 - RNA, 21 nt, Artificial Sequence
  Description of Artificial Sequence:  siNA antisense region
  misc_feature (1)..(2): 2'-deoxy
  misc_feature (3)..(5): 2'-deoxy-2'-fluoro
  misc_feature (6)..(8): 2'-deoxy
  misc_feature (9)..(14): 2'-deoxy-2'-fluoro
  misc_feature (15)..(15): 2'-deoxy
  misc_feature (16)..(16): 2'-deoxy-2'-fluoro
  misc_feature (17)..(19): 2'-deoxy
  misc_feature (20)..(20): Phosphorothioate 3'-Internucleotide Linkage
  misc_feature (21)..(21): n stands for thymidine
gacucaaauuuuccgugggnn

SEQ ID NO: 2958 - RNA, 21 nt, Artificial Sequence
  Description of Artificial Sequence:  siNA antisense region
  misc_feature (1)..(3): 2'-deoxy
  misc_feature (4)..(11): 2'-deoxy-2'-fluoro
  misc_feature (12)..(13): 2'-deoxy
  misc_feature (14)..(17): 2'-deoxy-2'-fluoro
  misc_feature (18)..(19): 2'-deoxy
  misc_feature (20)..(20): Phosphorothioate 3'-Internucleotide Linkage
  misc_feature (21)..(21): n stands for thymidine
ggaccuuucuuaguuuuggnn

SEQ ID NO: 2959 - RNA, 20 nt, Artificial Sequence
  Description of Artificial Sequence:  siNA sense region
  misc_feature (19)..(19): n stands for thymidine
  misc_feature (20)..(20): 3'-3 attached terminal deoxyabasic moeity
ugaguuuaaaaggcacccnn

SEQ ID NO: 2960 - RNA, 19 nt, Artificial Sequence
  Description of Artificial Sequence:  siNA sense region
  misc_feature (18)..(18): n stands for thymidine
  misc_feature (19)..(19): 3'-3 attached terminal deoxyabasic moeity
gaguuuaaaaggcacccnn

SEQ ID NO: 2961 - RNA, 18 nt, Artificial Sequence
  Description of Artificial Sequence:  siNA sense region
  misc_feature (17)..(17): n stands for thymidine
  misc_feature (18)..(18): 3'-3 attached terminal deoxyabasic moeity
aguuuaaaaggcacccnn

SEQ ID NO: 2962 - RNA, 17 nt, Artificial Sequence
  Description of Artificial Sequence:  siNA sense region
  misc_feature (16)..(16): n stands for thymidine
  misc_feature (17)..(17): 3'-3 attached terminal deoxyabasic moeity
guuuaaaaggcacccnn

SEQ ID NO: 2963 - RNA, 15 nt, Artificial Sequence
  Description of Artificial Sequence:  siNA sense region
  misc_feature (14)..(14): n stands for thymidine
  misc_feature (15)..(15): 3'-3 attached terminal deoxyabasic moeity
uuaaaaggcacccnn

SEQ ID NO: 2964 - RNA, 13 nt, Artificial Sequence
  Description of Artificial Sequence:  siNA sense region
  misc_feature (12)..(12): n stands for thymidine
  misc_feature (13)..(13): 3'-3 attached terminal deoxyabasic moeity
aaaaggcacccnn

SEQ ID NO: 2965 - RNA, 21 nt, Artificial Sequence
  Description of Artificial Sequence:  siNA sense region
  misc_feature (1)..(1): 5'-3 attached terminal deoxyabasic moeity
  misc_feature (20)..(21): n stands for thymidine
cugaguuuaaaaggcacccnn

SEQ ID NO: 2966 - RNA, 20 nt, Artificial Sequence
  Description of Artificial Sequence:  siNA sense region
  misc_feature (1)..(1): 5'-3 attached terminal deoxyabasic moeity
  misc_feature (20)..(20): n stands for thymidine
cugaguuuaaaaggcacccn

SEQ ID NO: 2967 - RNA, 19 nt, Artificial Sequence
  Description of Artificial Sequence:  siNA sense region
  misc_feature (1)..(1): 5'-3 attached terminal deoxyabasic moeity
cugaguuuaaaaggcaccc

SEQ ID NO: 2968 - RNA, 18 nt, Artificial Sequence
  Description of Artificial Sequence:  siNA sense region
  misc_feature (1)..(1): 5'-3 attached terminal deoxyabasic moeity
cugaguuuaaaaggcacc

SEQ ID NO: 2969 - RNA, 17 nt, Artificial Sequence
  Description of Artificial Sequence:  siNA sense region
  misc_feature (1)..(1): 5'-3 attached terminal deoxyabasic moeity
cugaguuuaaaaggcac

SEQ ID NO: 2970 - RNA, 15 nt, Artificial Sequence
  Description of Artificial Sequence:  siNA sense region
  misc_feature (1)..(1): 5'-3 attached terminal deoxyabasic moeity
cugaguuuaaaaggc

SEQ ID NO: 2971 - RNA, 20 nt, Artificial Sequence
  Description of Artificial Sequence:  siNA antisense region
  misc_feature (19)..(19): Phosphorothioate 3'-Internucleotide Linkage
  misc_feature (20)..(20): n stands for thymidine
ggugccuuuuaaacucagnn

SEQ ID NO: 2972 - RNA, 19 nt, Artificial Sequence
  Description of Artificial Sequence:  siNA antisense region
  misc_feature (18)..(18): Phosphorothioate 3'-Internucleotide Linkage
  misc_feature (19)..(19): n stands for thymidine
gugccuuuuaaacucagnn

SEQ ID NO: 2973 - RNA, 18 nt, Artificial Sequence
  Description of Artificial Sequence:  siNA antisense region
  misc_feature (17)..(17): Phosphorothioate 3'-Internucleotide Linkage
  misc_feature (18)..(18): n stands for thymidine
ugccuuuuaaacucagnn

SEQ ID NO: 2974 - RNA, 17 nt, Artificial Sequence
  Description of Artificial Sequence:  siNA antisense region
  misc_feature (16)..(16): Phosphorothioate 3'-Internucleotide Linkage
  misc_feature (17)..(17): n stands for thymidine
gccuuuuaaacucagnn

SEQ ID NO: 2975 - RNA, 16 nt, Artificial Sequence
  Description of Artificial Sequence:  siNA antisense region
  misc_feature (15)..(15): Phosphorothioate 3'-Internucleotide Linkage
  misc_feature (16)..(16): n stands for thymidine
ccuuuuaaacucagnn

SEQ ID NO: 2976 - RNA, 20 nt, Artificial Sequence
  Description of Artificial Sequence:  siNA antisense region
  misc_feature (20)..(20): n stands for thymidine
gggugccuuuuaaacucagn

SEQ ID NO: 2977 - RNA, 19 nt, Artificial Sequence
  Description of Artificial Sequence:  siNA antisense region
gggugccuuuuaaacucag

SEQ ID NO: 2978 - RNA, 18 nt, Artificial Sequence
  Description of Artificial Sequence:  siNA antisense region
gggugccuuuuaaacuca

SEQ ID NO: 2979 - RNA, 17 nt, Artificial Sequence
  Description of Artificial Sequence:  siNA antisense region
gggugccuuuuaaacuc

SEQ ID NO: 2980 - RNA, 16 nt, Artificial Sequence
  Description of Artificial Sequence:  siNA antisense region
gggugccuuuuaaacu

SEQ ID NO: 2981 - RNA, 14 nt, Artificial Sequence
  Description of Artificial Sequence:  siNA antisense region
gggugccuuuuaaa

SEQ ID NO: 2982 - RNA, 12 nt, Artificial Sequence
  Description of Artificial Sequence:  siNA antisense region
gggugccuuuua

SEQ ID NO: 2983 - RNA, 36 nt, Artificial Sequence
  Description of Artificial Sequence:  siNA antisense region
  misc_feature (1)..(36): 2'-O-methyl
  misc_feature (35)..(35): Phosphorothioate 3'-Internucleotide Linkage
cuaccagcgaguuuguaguuuaaaaaaaaaaaaaaa

SEQ ID NO: 2984 - RNA, 41 nt, Artificial Sequence
  Description of Artificial Sequence:  siNA antisense region
  misc_feature (40)..(40): Phosphorothioate 3'-Internucleotide Linkage
  misc_feature (41)..(41): 2'-O-methyl
cuaccagcgaguuuguaguuuaaaaaaaaaaaaaaaaaaaa

SEQ ID NO: 2985 - RNA, 46 nt, Artificial Sequence
  Description of Artificial Sequence:  siNA antisense region
  misc_feature (1)..(46): 2'-O-methyl
  misc_feature (45)..(45): Phosphorothioate 3'-Internucleotide Linkage
cuaccagcgaguuuguaguuuaaaaaaaaaaaaaaaaaaaaaaaaa

SEQ ID NO: 2986 - RNA, 51 nt, Artificial Sequence
  Description of Artificial Sequence:  siNA antisense region
  misc_feature (1)..(51): 2'-O-methyl
  misc_feature (50)..(50): Phosphorothioate 3'-Internucleotide Linkage
cuaccagcgaguuuguaguuuaaaaaaaaaaaaaaaaaaaaaaaaaaaaaa

SEQ ID NO: 2987 - RNA, 21 nt, Artificial Sequence
  Description of Artificial Sequence:  siNA sense region
  misc_feature (20)..(21): n stands for thymidine
cucacugccacucuaauugnn

SEQ ID NO: 2988 - RNA, 21 nt, Artificial Sequence
  Description of Artificial Sequence:  siNA sense region
  misc_feature (20)..(21): n stands for thymidine
ucacugccacucuaauugunn

SEQ ID NO: 2989 - RNA, 21 nt, Artificial Sequence
  Description of Artificial Sequence:  siNA sense region
  misc_feature (20)..(21): n stands for thymidine
cacugccacucuaauugucnn

SEQ ID NO: 2990 - RNA, 21 nt, Artificial Sequence
  Description of Artificial Sequence:  siNA sense region
  misc_feature (20)..(21): n stands for thymidine
gaccccgucucuauaccaann

SEQ ID NO: 2991 - RNA, 21 nt, Artificial Sequence
  Description of Artificial Sequence:  siNA sense region
  misc_feature (20)..(21): n stands for thymidine
caauuagaguggcagugagnn

SEQ ID NO: 2992 - RNA, 21 nt, Artificial Sequence
  Description of Artificial Sequence:  siNA sense region
  misc_feature (20)..(21): n stands for thymidine
acaauuagaguggcagugann

SEQ ID NO: 2993 - RNA, 21 nt, Artificial Sequence
  Description of Artificial Sequence:  siNA sense region
  misc_feature (20)..(21): n stands for thymidine
gacaauuagaguggcagugnn

SEQ ID NO: 2994 - RNA, 21 nt, Artificial Sequence
  Description of Artificial Sequence:  siNA sense region
  misc_feature (20)..(21): n stands for thymidine
uugguauagagacggggucnn

SEQ ID NO: 2995 - RNA, 21 nt, Artificial Sequence
  Description of Artificial Sequence:  siNA sense region
  misc_feature (1)..(1): 5'-3 attached terminal deoxyabasic moeity
  misc_feature (1)..(2): 2'-deoxy-2'-fluoro
  misc_feature (3)..(5): 2'-deoxy
  misc_feature (6)..(8): 2'-deoxy-2'-fluoro
  misc_feature (9)..(19): 2'-deoxy
  misc_feature (20)..(20): n stands for thymidine
  misc_feature (21)..(21): 3'-3 attached terminal deoxyabasic moeity
cugaguuuaaaaggcacccnn

SEQ ID NO: 2996 - RNA, 21 nt, Artificial Sequence
  Description of Artificial Sequence:  siNA antisense region
  misc_feature (1)..(3): 2'-O-methyl
  misc_feature (5)..(5): 2'-O-methyl
  misc_feature (7)..(11): 2'-deoxy-2'-fluoro
  misc_feature (12)..(14): 2'-O-methyl
  misc_feature (15)..(17): 2'-deoxy-2'-fluoro
  misc_feature (18)..(19): 2'-O-methyl
  misc_feature (20)..(20): Phosphorothioate 3'-Internucleotide Linkage
  misc_feature (21)..(21): n stands for thymidine
gggugccuuuuaaacucagnn

SEQ ID NO: 2997 - RNA, 21 nt, Artificial Sequence
  Description of Artificial Sequence:  siNA antisense region
  misc_feature (1)..(3): 2'-O-methyl
  misc_feature (5)..(5): 2'-O-methyl
  misc_feature (6)..(11): 2'-deoxy-2'-fluoro
  misc_feature (12)..(14): 2'-O-methyl
  misc_feature (15)..(17): 2'-deoxy-2'-fluoro
  misc_feature (18)..(19): 2'-O-methyl
  misc_feature (20)..(20): Phosphorothioate 3'-Internucleotide Linkage
  misc_feature (21)..(21): n stands for thymidine
gggugccuuuuaaacucagnn

SEQ ID NO: 2998 - RNA, 21 nt, Artificial Sequence
  Description of Artificial Sequence:  siNA antisense region
  misc_feature (1)..(3): 2'-O-methyl
  misc_feature (5)..(5): 2'-O-methyl
  misc_feature (6)..(11): 2'-deoxy-2'-fluoro
  misc_feature (12)..(14): 2'-O-methyl
  misc_feature (15)..(17): 2'-deoxy-2'-fluoro
  misc_feature (18)..(19): 2'-O-methyl
  misc_feature (20)..(20): Phosphorothioate 3'-Internucleotide Linkage
  misc_feature (21)..(21): n stands for thymidine
gggugccuuuuaaacucagnn

SEQ ID NO: 2999 - RNA, 21 nt, Artificial Sequence
  Description of Artificial Sequence:  siNA antisense region
  misc_feature (1)..(3): 2'-O-methyl
  misc_feature (4)..(4): 2'-deoxy-2'-fluoro
  misc_feature (5)..(5): 2'-O-methyl
  misc_feature (6)..(11): 2'-deoxy-2'-fluoro
  misc_feature (15)..(17): 2'-deoxy-2'-fluoro
  misc_feature (19)..(19): 2'-O-methyl
  misc_feature (20)..(20): Phosphorothioate 3'-Internucleotide Linkage
  misc_feature (21)..(21): n stands for thymidine
gggugccuuuuaaacucagnn

SEQ ID NO: 3000 - RNA, 21 nt, Artificial Sequence
  Description of Artificial Sequence:  siNA antisense region
  misc_feature (1)..(3): 2'-O-methyl
  misc_feature (4)..(4): 2'-deoxy-2'-fluoro
  misc_feature (5)..(5): 2'-O-methyl
  misc_feature (6)..(11): 2'-deoxy-2'-fluoro
  misc_feature (15)..(17): 2'-deoxy-2'-fluoro
  misc_feature (19)..(19): 2'-O-methyl
  misc_feature (20)..(20): Phosphorothioate 3'-Internucleotide Linkage
  misc_feature (21)..(21): n stands for thymidine
gggugccuuuuaaacucagnn

SEQ ID NO: 3001 - RNA, 21 nt, Artificial Sequence
  Description of Artificial Sequence:  siNA antisense region
  misc_feature (2)..(3): 2'-O-methyl
  misc_feature (4)..(4): 2'-deoxy-2'-fluoro
  misc_feature (5)..(5): 2'-O-methyl
  misc_feature (6)..(11): 2'-deoxy-2'-fluoro
  misc_feature (12)..(14): 2'-O-methyl
  misc_feature (15)..(17): 2'-deoxy-2'-fluoro
  misc_feature (18)..(19): 2'-O-methyl
  misc_feature (20)..(20): Phosphorothioate 3'-Internucleotide Linkage
  misc_feature (21)..(21): n stands for thymidine
gggugccuuuuaaacucagnn

SEQ ID NO: 3002 - RNA, 21 nt, Artificial Sequence
  Description of Artificial Sequence:  siNA sense region
  misc_feature (1)..(1): 5'-3 attached terminal deoxyabasic moeity
  misc_feature (1)..(3): 2'-deoxy
  misc_feature (4)..(5): 2'-deoxy-2'-fluoro
  misc_feature (6)..(8): 2'-deoxy
  misc_feature (9)..(11): 2'-deoxy-2'-fluoro
  misc_feature (12)..(17): 2'-deoxy
  misc_feature (18)..(18): 2'-deoxy-2'-fluoro
  misc_feature (19)..(19): 2'-deoxy
  misc_feature (20)..(20): n stands for thymidine
  misc_feature (21)..(21): 3'-3 attached terminal deoxyabasic moeity
gaacugaguuuaaaaggcann

SEQ ID NO: 3003 - RNA, 21 nt, Artificial Sequence
  Description of Artificial Sequence:  siNA sense region
  misc_feature (1)..(3): 2'-deoxy
  misc_feature (1)..(1): 5'-3 attached terminal deoxyabasic moeity
  misc_feature (4)..(5): 2'-deoxy-2'-fluoro
  misc_feature (6)..(8): 2'-deoxy
  misc_feature (9)..(11): 2'-deoxy-2'-fluoro
  misc_feature (12)..(19): 2'-deoxy
  misc_feature (20)..(20): n stands for thymidine
  misc_feature (21)..(21): 3'-3 attached terminal deoxyabasic moeity
gaacugaguuuaaaaggcann

SEQ ID NO: 3004 - RNA, 21 nt, Artificial Sequence
  Description of Artificial Sequence:  siNA antisense region
  misc_feature (2)..(2): 2'-O-methyl
  misc_feature (3)..(8): 2'-deoxy-2'-fluoro
  misc_feature (9)..(11): 2'-O-methyl
  misc_feature (12)..(14): 2'-deoxy-2'-fluoro
  misc_feature (15)..(16): 2'-O-methyl
  misc_feature (17)..(18): 2'-deoxy-2'-fluoro
  misc_feature (20)..(20): Phosphorothioate 3'-Internucleotide Linkage
  misc_feature (21)..(21): n stands for thymidine
ugccuuuuaaacucaguucnn

SEQ ID NO: 3005 - RNA, 21 nt, Artificial Sequence
  Description of Artificial Sequence:  siNA antisense region
  misc_feature (1)..(2): 2'-O-methyl
  misc_feature (3)..(8): 2'-deoxy-2'-fluoro
  misc_feature (9)..(11): 2'-O-methyl
  misc_feature (12)..(14): 2'-deoxy-2'-fluoro
  misc_feature (15)..(16): 2'-O-methyl
  misc_feature (17)..(19): 2'-deoxy-2'-fluoro
  misc_feature (20)..(20): Phosphorothioate 3'-Internucleotide Linkage
  misc_feature (21)..(21): n stands for thymidine
ugccuuuuaaacucaguucnn

SEQ ID NO: 3006 - RNA, 21 nt, Artificial Sequence
  Description of Artificial Sequence:  siNA antisense region
  misc_feature (2)..(3): 2'-O-methyl
  misc_feature (4)..(8): 2'-deoxy-2'-fluoro
  misc_feature (9)..(11): 2'-O-methyl
  misc_feature (12)..(14): 2'-deoxy-2'-fluoro
  misc_feature (15)..(16): 2'-O-methyl
  misc_feature (17)..(19): 2'-deoxy-2'-fluoro
  misc_feature (20)..(20): Phosphorothioate 3'-Internucleotide Linkage
  misc_feature (21)..(21): n stands for thymidine
ugccuuuuaaacucaguucnn

SEQ ID NO: 3007 - RNA, 21 nt, Artificial Sequence
  Description of Artificial Sequence:  siNA sense region
  misc_feature (1)..(3): 2'-deoxy
  misc_feature (4)..(5): 2'-deoxy-2'-fluoro
  misc_feature (6)..(8): 2'-deoxy
  misc_feature (9)..(9): 2'-deoxy-2'-fluoro
  misc_feature (10)..(10): 2'-deoxy
  misc_feature (11)..(11): 2'-deoxy-2'-fluoro
  misc_feature (12)..(17): 2'-deoxy
  misc_feature (18)..(18): 2'-deoxy-2'-fluoro
  misc_feature (19)..(19): 2'-deoxy
  misc_feature (20)..(21): n stands for thymidine
gaacugaguuuaaaaggcann

SEQ ID NO: 3008 - RNA, 21 nt, Artificial Sequence
  Description of Artificial Sequence:  siNA antisense region
  misc_feature (1)..(2): 2'-O-methyl
  misc_feature (3)..(7): 2'-deoxy-2'-fluoro
  misc_feature (8)..(11): 2'-O-methyl
  misc_feature (12)..(14): 2'-deoxy-2'-fluoro
  misc_feature (15)..(17): 2'-O-methyl
  misc_feature (18)..(19): 2'-deoxy-2'-fluoro
  misc_feature (20)..(20): Phosphorothioate 3'-Internucleotide Linkage
  misc_feature (21)..(21): n stands for thymidine
ugccuuuuaaacucaguucnn

SEQ ID NO: 3009 - RNA, 21 nt, Artificial Sequence
  Description of Artificial Sequence:  siNA sense region
  misc_feature (20)..(21): n stands for thymidine
gcgggcuccggggcucgggnn

SEQ ID NO: 3010 - RNA, 21 nt, Artificial Sequence
  Description of Artificial Sequence:  siNA sense region
  misc_feature (20)..(21): n stands for thymidine
ggcuggagccgcgagacggnn

SEQ ID NO: 3011 - RNA, 21 nt, Artificial Sequence
  Description of Artificial Sequence:  siNA sense region
  misc_feature (20)..(21): n stands for thymidine
gcuggagccgcgagacgggnn

SEQ ID NO: 3012 - RNA, 21 nt, Artificial Sequence
  Description of Artificial Sequence:  siNA sense region
  misc_feature (20)..(21): n stands for thymidine
uggucagcuacugggacacnn

SEQ ID NO: 3013 - RNA, 21 nt, Artificial Sequence
  Description of Artificial Sequence:  siNA sense region
  misc_feature (20)..(21): n stands for thymidine
ggucagcuacugggacaccnn

SEQ ID NO: 3014 - RNA, 21 nt, Artificial Sequence
  Description of Artificial Sequence:  siNA sense region
  misc_feature (20)..(21): n stands for thymidine
uuuaaaaggcacccagcacnn

SEQ ID NO: 3015 - RNA, 21 nt, Artificial Sequence
  Description of Artificial Sequence:  siNA sense region
  misc_feature (20)..(21): n stands for thymidine
cagcccauaaauggucuuunn

SEQ ID NO: 3016 - RNA, 21 nt, Artificial Sequence
  Description of Artificial Sequence:  siNA sense region
  misc_feature (20)..(21): n stands for thymidine
aaagaagaaggaaacagaann

SEQ ID NO: 3017 - RNA, 21 nt, Artificial Sequence
  Description of Artificial Sequence:  siNA sense region
  misc_feature (20)..(21): n stands for thymidine
aagaagaaggaaacagaaunn

SEQ ID NO: 3018 - RNA, 21 nt, Artificial Sequence
  Description of Artificial Sequence:  siNA sense region
  misc_feature (20)..(21): n stands for thymidine
cucgucauucccugccgggnn

SEQ ID NO: 3019 - RNA, 21 nt, Artificial Sequence
  Description of Artificial Sequence:  siNA sense region
  misc_feature (20)..(21): n stands for thymidine
ucgucauucccugccgggunn

SEQ ID NO: 3020 - RNA, 21 nt, Artificial Sequence
  Description of Artificial Sequence:  siNA sense region
  misc_feature (20)..(21): n stands for thymidine
aaaaguuuccacuugacacnn

SEQ ID NO: 3021 - RNA, 21 nt, Artificial Sequence
  Description of Artificial Sequence:  siNA sense region
  misc_feature (20)..(21): n stands for thymidine
aaaguuuccacuugacacunn

SEQ ID NO: 3022 - RNA, 21 nt, Artificial Sequence
  Description of Artificial Sequence:  siNA sense region
  misc_feature (20)..(21): n stands for thymidine
cgcauaaucugggacaguann

SEQ ID NO: 3023 - RNA, 21 nt, Artificial Sequence
  Description of Artificial Sequence:  siNA sense region
  misc_feature (20)..(21): n stands for thymidine
gcauaaucugggacaguagnn

SEQ ID NO: 3024 - RNA, 21 nt, Artificial Sequence
  Description of Artificial Sequence:  siNA sense region
  misc_feature (20)..(21): n stands for thymidine
cauaaucugggacaguagann

SEQ ID NO: 3025 - RNA, 21 nt, Artificial Sequence
  Description of Artificial Sequence:  siNA sense region
  misc_feature (20)..(21): n stands for thymidine
auaaucugggacaguagaann

SEQ ID NO: 3026 - RNA, 21 nt, Artificial Sequence
  Description of Artificial Sequence:  siNA sense region
  misc_feature (20)..(21): n stands for thymidine
ccucagugcauauauaugann

SEQ ID NO: 3027 - RNA, 21 nt, Artificial Sequence
  Description of Artificial Sequence:  siNA sense region
  misc_feature (20)..(21): n stands for thymidine
gaagaggaugcagggaauunn

SEQ ID NO: 3028 - RNA, 21 nt, Artificial Sequence
  Description of Artificial Sequence:  siNA sense region
  misc_feature (20)..(21): n stands for thymidine
acgaaaaggccgugucaucnn

SEQ ID NO: 3029 - RNA, 21 nt, Artificial Sequence
  Description of Artificial Sequence:  siNA sense region
  misc_feature (20)..(21): n stands for thymidine
ucaagugguucuggcacccnn

SEQ ID NO: 3030 - RNA, 21 nt, Artificial Sequence
  Description of Artificial Sequence:  siNA sense region
  misc_feature (20)..(21): n stands for thymidine
cauaaucauuccgaagcaann

SEQ ID NO: 3031 - RNA, 21 nt, Artificial Sequence
  Description of Artificial Sequence:  siNA sense region
  misc_feature (20)..(21): n stands for thymidine
cugugggaagaaacauaagnn

SEQ ID NO: 3032 - RNA, 21 nt, Artificial Sequence
  Description of Artificial Sequence:  siNA sense region
  misc_feature (20)..(21): n stands for thymidine
ccucagugaucacacagugnn

SEQ ID NO: 3033 - RNA, 21 nt, Artificial Sequence
  Description of Artificial Sequence:  siNA sense region
  misc_feature (20)..(21): n stands for thymidine
cucagugaucacacaguggnn

SEQ ID NO: 3034 - RNA, 21 nt, Artificial Sequence
  Description of Artificial Sequence:  siNA sense region
  misc_feature (20)..(21): n stands for thymidine
agccuggaauuauuuuaggnn

SEQ ID NO: 3035 - RNA, 21 nt, Artificial Sequence
  Description of Artificial Sequence:  siNA sense region
  misc_feature (20)..(21): n stands for thymidine
agaagaggaugaaggugucnn

SEQ ID NO: 3036 - RNA, 21 nt, Artificial Sequence
  Description of Artificial Sequence:  siNA sense region
  misc_feature (20)..(21): n stands for thymidine
uaaucuggagcugaucacunn

SEQ ID NO: 3037 - RNA, 21 nt, Artificial Sequence
  Description of Artificial Sequence:  siNA sense region
  misc_feature (20)..(21): n stands for thymidine
cuggagcugaucacucuaann

SEQ ID NO: 3038 - RNA, 21 nt, Artificial Sequence
  Description of Artificial Sequence:  siNA sense region
  misc_feature (20)..(21): n stands for thymidine
caagugggaguuugcccggnn

SEQ ID NO: 3039 - RNA, 21 nt, Artificial Sequence
  Description of Artificial Sequence:  siNA sense region
  misc_feature (20)..(21): n stands for thymidine
uuaagaaaucaccuacgugnn

SEQ ID NO: 3040 - RNA, 21 nt, Artificial Sequence
  Description of Artificial Sequence:  siNA sense region
  misc_feature (20)..(21): n stands for thymidine
auggugauuguugaauacunn

SEQ ID NO: 3041 - RNA, 21 nt, Artificial Sequence
  Description of Artificial Sequence:  siNA sense region
  misc_feature (20)..(21): n stands for thymidine
aagaaaaaauggagccaggnn

SEQ ID NO: 3042 - RNA, 21 nt, Artificial Sequence
  Description of Artificial Sequence:  siNA sense region
  misc_feature (20)..(21): n stands for thymidine
caaggcaagaaaccaagacnn

SEQ ID NO: 3043 - RNA, 21 nt, Artificial Sequence
  Description of Artificial Sequence:  siNA sense region
  misc_feature (20)..(21): n stands for thymidine
aaggcaagaaaccaagacunn

SEQ ID NO: 3044 - RNA, 21 nt, Artificial Sequence
  Description of Artificial Sequence:  siNA sense region
  misc_feature (20)..(21): n stands for thymidine
gugauguugaggaagaggann

SEQ ID NO: 3045 - RNA, 21 nt, Artificial Sequence
  Description of Artificial Sequence:  siNA sense region
  misc_feature (20)..(21): n stands for thymidine
ugauguugaggaagaggagnn

SEQ ID NO: 3046 - RNA, 21 nt, Artificial Sequence
  Description of Artificial Sequence:  siNA sense region
  misc_feature (20)..(21): n stands for thymidine
uacaguuuucaaguggccann

SEQ ID NO: 3047 - RNA, 21 nt, Artificial Sequence
  Description of Artificial Sequence:  siNA sense region
  misc_feature (20)..(21): n stands for thymidine
acaguuuucaaguggccagnn

SEQ ID NO: 3048 - RNA, 21 nt, Artificial Sequence
  Description of Artificial Sequence:  siNA sense region
  misc_feature (20)..(21): n stands for thymidine
uucaaguggccagaggcaunn

SEQ ID NO: 3049 - RNA, 21 nt, Artificial Sequence
  Description of Artificial Sequence:  siNA sense region
  misc_feature (20)..(21): n stands for thymidine
ucaaguggccagaggcaugnn

SEQ ID NO: 3050 - RNA, 21 nt, Artificial Sequence
  Description of Artificial Sequence:  siNA sense region
  misc_feature (20)..(21): n stands for thymidine
cagaaagugcauucaucggnn

SEQ ID NO: 3051 - RNA, 21 nt, Artificial Sequence
  Description of Artificial Sequence:  siNA sense region
  misc_feature (20)..(21): n stands for thymidine
cgagaaacauucuuuuaucnn

SEQ ID NO: 3052 - RNA, 21 nt, Artificial Sequence
  Description of Artificial Sequence:  siNA sense region
  misc_feature (20)..(21): n stands for thymidine
gagaaacauucuuuuaucunn

SEQ ID NO: 3053 - RNA, 21 nt, Artificial Sequence
  Description of Artificial Sequence:  siNA sense region
  misc_feature (20)..(21): n stands for thymidine
agaaacauucuuuuaucugnn

SEQ ID NO: 3054 - RNA, 21 nt, Artificial Sequence
  Description of Artificial Sequence:  siNA sense region
  misc_feature (20)..(21): n stands for thymidine
gcugugggaaaucuucuccnn

SEQ ID NO: 3055 - RNA, 21 nt, Artificial Sequence
  Description of Artificial Sequence:  siNA sense region
  misc_feature (20)..(21): n stands for thymidine
ccuucucugaggacuucuunn

SEQ ID NO: 3056 - RNA, 21 nt, Artificial Sequence
  Description of Artificial Sequence:  siNA sense region
  misc_feature (20)..(21): n stands for thymidine
aggaagcucugaugaugucnn

SEQ ID NO: 3057 - RNA, 21 nt, Artificial Sequence
  Description of Artificial Sequence:  siNA sense region
  misc_feature (20)..(21): n stands for thymidine
ggaagcucugaugaugucann

SEQ ID NO: 3058 - RNA, 21 nt, Artificial Sequence
  Description of Artificial Sequence:  siNA sense region
  misc_feature (20)..(21): n stands for thymidine
aaguucaugagccuggaaann

SEQ ID NO: 3059 - RNA, 21 nt, Artificial Sequence
  Description of Artificial Sequence:  siNA sense region
  misc_feature (20)..(21): n stands for thymidine
aguucaugagccuggaaagnn

SEQ ID NO: 3060 - RNA, 21 nt, Artificial Sequence
  Description of Artificial Sequence:  siNA sense region
  misc_feature (20)..(21): n stands for thymidine
agccuggaaagaaucaaaann

SEQ ID NO: 3061 - RNA, 21 nt, Artificial Sequence
  Description of Artificial Sequence:  siNA sense region
  misc_feature (20)..(21): n stands for thymidine
gcugugggcacgucagcgann

SEQ ID NO: 3062 - RNA, 21 nt, Artificial Sequence
  Description of Artificial Sequence:  siNA sense region
  misc_feature (20)..(21): n stands for thymidine
aaggcaagcgcagguucacnn

SEQ ID NO: 3063 - RNA, 21 nt, Artificial Sequence
  Description of Artificial Sequence:  siNA sense region
  misc_feature (20)..(21): n stands for thymidine
cagcccaaaacccagggcann

SEQ ID NO: 3064 - RNA, 21 nt, Artificial Sequence
  Description of Artificial Sequence:  siNA sense region
  misc_feature (20)..(21): n stands for thymidine
ggcaagaaaaggacaaauann

SEQ ID NO: 3065 - RNA, 21 nt, Artificial Sequence
  Description of Artificial Sequence:  siNA sense region
  misc_feature (20)..(21): n stands for thymidine
ggcuccucuaguaagaugcnn

SEQ ID NO: 3066 - RNA, 21 nt, Artificial Sequence
  Description of Artificial Sequence:  siNA sense region
  misc_feature (20)..(21): n stands for thymidine
cuccaggccaugauggccunn

SEQ ID NO: 3067 - RNA, 21 nt, Artificial Sequence
  Description of Artificial Sequence:  siNA sense region
  misc_feature (20)..(21): n stands for thymidine
uccaggccaugauggccuunn

SEQ ID NO: 3068 - RNA, 21 nt, Artificial Sequence
  Description of Artificial Sequence:  siNA sense region
  misc_feature (20)..(21): n stands for thymidine
accccgucucuauaccaacnn

SEQ ID NO: 3069 - RNA, 21 nt, Artificial Sequence
  Description of Artificial Sequence:  siNA sense region
  misc_feature (20)..(21): n stands for thymidine
cccgucucuauaccaaccann

SEQ ID NO: 3070 - RNA, 21 nt, Artificial Sequence
  Description of Artificial Sequence:  siNA sense region
  misc_feature (20)..(21): n stands for thymidine
ccgucucuauaccaaccaann

SEQ ID NO: 3071 - RNA, 21 nt, Artificial Sequence
  Description of Artificial Sequence:  siNA sense region
  misc_feature (20)..(21): n stands for thymidine
ucaagugggccuuggaucgnn

SEQ ID NO: 3072 - RNA, 21 nt, Artificial Sequence
  Description of Artificial Sequence:  siNA sense region
  misc_feature (20)..(21): n stands for thymidine
caagugggccuuggaucgcnn

SEQ ID NO: 3073 - RNA, 21 nt, Artificial Sequence
  Description of Artificial Sequence:  siNA antisense region
  misc_feature (20)..(21): n stands for thymidine
cccgagccccggagcccgcnn

SEQ ID NO: 3074 - RNA, 21 nt, Artificial Sequence
  Description of Artificial Sequence:  siNA antisense region
  misc_feature (20)..(21): n stands for thymidine
ccgucucgcggcuccagccnn

SEQ ID NO: 3075 - RNA, 21 nt, Artificial Sequence
  Description of Artificial Sequence:  siNA antisense region
  misc_feature (20)..(21): n stands for thymidine
cccgucucgcggcuccagcnn

SEQ ID NO: 3076 - RNA, 21 nt, Artificial Sequence
  Description of Artificial Sequence:  siNA antisense region
  misc_feature (20)..(21): n stands for thymidine
gugucccaguagcugaccann

SEQ ID NO: 3077 - RNA, 21 nt, Artificial Sequence
  Description of Artificial Sequence:  siNA antisense region
  misc_feature (20)..(21): n stands for thymidine
ggugucccaguagcugaccnn

SEQ ID NO: 3078 - RNA, 21 nt, Artificial Sequence
  Description of Artificial Sequence:  siNA antisense region
  misc_feature (20)..(21): n stands for thymidine
gugcugggugccuuuuaaann

SEQ ID NO: 3079 - RNA, 21 nt, Artificial Sequence
  Description of Artificial Sequence:  siNA antisense region
  misc_feature (20)..(21): n stands for thymidine
aaagaccauuuaugggcugnn

SEQ ID NO: 3080 - RNA, 21 nt, Artificial Sequence
  Description of Artificial Sequence:  siNA antisense region
  misc_feature (20)..(21): n stands for thymidine
uucuguuuccuucuucuuunn

SEQ ID NO: 3081 - RNA, 21 nt, Artificial Sequence
  Description of Artificial Sequence:  siNA antisense region
  misc_feature (20)..(21): n stands for thymidine
auucuguuuccuucuucuunn

SEQ ID NO: 3082 - RNA, 21 nt, Artificial Sequence
  Description of Artificial Sequence:  siNA antisense region
  misc_feature (20)..(21): n stands for thymidine
cccggcagggaaugacgagnn

SEQ ID NO: 3083 - RNA, 21 nt, Artificial Sequence
  Description of Artificial Sequence:  siNA antisense region
  misc_feature (20)..(21): n stands for thymidine
acccggcagggaaugacgann

SEQ ID NO: 3084 - RNA, 21 nt, Artificial Sequence
  Description of Artificial Sequence:  siNA antisense region
  misc_feature (20)..(21): n stands for thymidine
gugucaaguggaaacuuuunn

SEQ ID NO: 3085 - RNA, 21 nt, Artificial Sequence
  Description of Artificial Sequence:  siNA antisense region
  misc_feature (20)..(21): n stands for thymidine
agugucaaguggaaacuuunn

SEQ ID NO: 3086 - RNA, 21 nt, Artificial Sequence
  Description of Artificial Sequence:  siNA antisense region
  misc_feature (20)..(21): n stands for thymidine
uacugucccagauuaugcgnn

SEQ ID NO: 3087 - RNA, 21 nt, Artificial Sequence
  Description of Artificial Sequence:  siNA antisense region
  misc_feature (20)..(21): n stands for thymidine
cuacugucccagauuaugcnn

SEQ ID NO: 3088 - RNA, 21 nt, Artificial Sequence
  Description of Artificial Sequence:  siNA antisense region
  misc_feature (20)..(21): n stands for thymidine
ucuacugucccagauuaugnn

SEQ ID NO: 3089 - RNA, 21 nt, Artificial Sequence
  Description of Artificial Sequence:  siNA antisense region
  misc_feature (20)..(21): n stands for thymidine
uucuacugucccagauuaunn

SEQ ID NO: 3090 - RNA, 21 nt, Artificial Sequence
  Description of Artificial Sequence:  siNA antisense region
  misc_feature (20)..(21): n stands for thymidine
ucauauauaugcacugaggnn

SEQ ID NO: 3091 - RNA, 21 nt, Artificial Sequence
  Description of Artificial Sequence:  siNA antisense region
  misc_feature (20)..(21): n stands for thymidine
aauucccugcauccucuucnn

SEQ ID NO: 3092 - RNA, 21 nt, Artificial Sequence
  Description of Artificial Sequence:  siNA antisense region
  misc_feature (20)..(21): n stands for thymidine
gaugacacggccuuuucgunn

SEQ ID NO: 3093 - RNA, 21 nt, Artificial Sequence
  Description of Artificial Sequence:  siNA antisense region
  misc_feature (20)..(21): n stands for thymidine
gggugccagaaccacuugann

SEQ ID NO: 3094 - RNA, 21 nt, Artificial Sequence
  Description of Artificial Sequence:  siNA antisense region
  misc_feature (20)..(21): n stands for thymidine
uugcuucggaaugauuaugnn

SEQ ID NO: 3095 - RNA, 21 nt, Artificial Sequence
  Description of Artificial Sequence:  siNA antisense region
  misc_feature (20)..(21): n stands for thymidine
cuuauguuucuucccacagnn

SEQ ID NO: 3096 - RNA, 21 nt, Artificial Sequence
  Description of Artificial Sequence:  siNA antisense region
  misc_feature (20)..(21): n stands for thymidine
cacugugugaucacugaggnn

SEQ ID NO: 3097 - RNA, 21 nt, Artificial Sequence
  Description of Artificial Sequence:  siNA antisense region
  misc_feature (20)..(21): n stands for thymidine
ccacugugugaucacugagnn

SEQ ID NO: 3098 - RNA, 21 nt, Artificial Sequence
  Description of Artificial Sequence:  siNA antisense region
  misc_feature (20)..(21): n stands for thymidine
ccuaaaauaauuccaggcunn

SEQ ID NO: 3099 - RNA, 21 nt, Artificial Sequence
  Description of Artificial Sequence:  siNA antisense region
  misc_feature (20)..(21): n stands for thymidine
gacaccuucauccucuucunn

SEQ ID NO: 3100 - RNA, 21 nt, Artificial Sequence
  Description of Artificial Sequence:  siNA antisense region
  misc_feature (20)..(21): n stands for thymidine
agugaucagcuccagauuann

SEQ ID NO: 3101 - RNA, 21 nt, Artificial Sequence
  Description of Artificial Sequence:  siNA antisense region
  misc_feature (20)..(21): n stands for thymidine
uuagagugaucagcuccagnn

SEQ ID NO: 3102 - RNA, 21 nt, Artificial Sequence
  Description of Artificial Sequence:  siNA antisense region
  misc_feature (20)..(21): n stands for thymidine
ccgggcaaacucccacuugnn

SEQ ID NO: 3103 - RNA, 21 nt, Artificial Sequence
  Description of Artificial Sequence:  siNA antisense region
  misc_feature (20)..(21): n stands for thymidine
cacguaggugauuucuuaann

SEQ ID NO: 3104 - RNA, 21 nt, Artificial Sequence
  Description of Artificial Sequence:  siNA antisense region
  misc_feature (20)..(21): n stands for thymidine
aguauucaacaaucaccaunn

SEQ ID NO: 3105 - RNA, 21 nt, Artificial Sequence
  Description of Artificial Sequence:  siNA antisense region
  misc_feature (20)..(21): n stands for thymidine
ccuggcuccauuuuuucuunn

SEQ ID NO: 3106 - RNA, 21 nt, Artificial Sequence
  Description of Artificial Sequence:  siNA antisense region
  misc_feature (20)..(21): n stands for thymidine
gucuugguuucuugccuugnn

SEQ ID NO: 3107 - RNA, 21 nt, Artificial Sequence
  Description of Artificial Sequence:  siNA antisense region
  misc_feature (20)..(21): n stands for thymidine
agucuugguuucuugccuunn

SEQ ID NO: 3108 - RNA, 21 nt, Artificial Sequence
  Description of Artificial Sequence:  siNA antisense region
  misc_feature (20)..(21): n stands for thymidine
uccucuuccucaacaucacnn

SEQ ID NO: 3109 - RNA, 21 nt, Artificial Sequence
  Description of Artificial Sequence:  siNA antisense region
  misc_feature (20)..(21): n stands for thymidine
cuccucuuccucaacaucann

SEQ ID NO: 3110 - RNA, 21 nt, Artificial Sequence
  Description of Artificial Sequence:  siNA antisense region
  misc_feature (20)..(21): n stands for thymidine
uggccacuugaaaacuguann

SEQ ID NO: 3111 - RNA, 21 nt, Artificial Sequence
  Description of Artificial Sequence:  siNA antisense region
  misc_feature (20)..(21): n stands for thymidine
cuggccacuugaaaacugunn

SEQ ID NO: 3112 - RNA, 21 nt, Artificial Sequence
  Description of Artificial Sequence:  siNA antisense region
  misc_feature (20)..(21): n stands for thymidine
augccucuggccacuugaann

SEQ ID NO: 3113 - RNA, 21 nt, Artificial Sequence
  Description of Artificial Sequence:  siNA antisense region
  misc_feature (20)..(21): n stands for thymidine
caugccucuggccacuugann

SEQ ID NO: 3114 - RNA, 21 nt, Artificial Sequence
  Description of Artificial Sequence:  siNA antisense region
  misc_feature (20)..(21): n stands for thymidine
ccgaugaaugcacuuucugnn

SEQ ID NO: 3115 - RNA, 21 nt, Artificial Sequence
  Description of Artificial Sequence:  siNA antisense region
  misc_feature (20)..(21): n stands for thymidine
gauaaaagaauguuucucgnn

SEQ ID NO: 3116 - RNA, 21 nt, Artificial Sequence
  Description of Artificial Sequence:  siNA antisense region
  misc_feature (20)..(21): n stands for thymidine
agauaaaagaauguuucucnn

SEQ ID NO: 3117 - RNA, 21 nt, Artificial Sequence
  Description of Artificial Sequence:  siNA antisense region
  misc_feature (20)..(21): n stands for thymidine
cagauaaaagaauguuucunn

SEQ ID NO: 3118 - RNA, 21 nt, Artificial Sequence
  Description of Artificial Sequence:  siNA antisense region
  misc_feature (20)..(21): n stands for thymidine
ggagaagauuucccacagcnn

SEQ ID NO: 3119 - RNA, 21 nt, Artificial Sequence
  Description of Artificial Sequence:  siNA antisense region
  misc_feature (20)..(21): n stands for thymidine
aagaaguccucagagaaggnn

SEQ ID NO: 3120 - RNA, 21 nt, Artificial Sequence
  Description of Artificial Sequence:  siNA antisense region
  misc_feature (20)..(21): n stands for thymidine
gacaucaucagagcuuccunn

SEQ ID NO: 3121 - RNA, 21 nt, Artificial Sequence
  Description of Artificial Sequence:  siNA antisense region
  misc_feature (20)..(21): n stands for thymidine
ugacaucaucagagcuuccnn

SEQ ID NO: 3122 - RNA, 21 nt, Artificial Sequence
  Description of Artificial Sequence:  siNA antisense region
  misc_feature (20)..(21): n stands for thymidine
uuuccaggcucaugaacuunn

SEQ ID NO: 3123 - RNA, 21 nt, Artificial Sequence
  Description of Artificial Sequence:  siNA antisense region
  misc_feature (20)..(21): n stands for thymidine
cuuuccaggcucaugaacunn

SEQ ID NO: 3124 - RNA, 21 nt, Artificial Sequence
  Description of Artificial Sequence:  siNA antisense region
  misc_feature (20)..(21): n stands for thymidine
uuuugauucuuuccaggcunn

SEQ ID NO: 3125 - RNA, 21 nt, Artificial Sequence
  Description of Artificial Sequence:  siNA antisense region
  misc_feature (20)..(21): n stands for thymidine
ucgcugacgugcccacagcnn

SEQ ID NO: 3126 - RNA, 21 nt, Artificial Sequence
  Description of Artificial Sequence:  siNA antisense region
  misc_feature (20)..(21): n stands for thymidine
gugaaccugcgcuugccuunn

SEQ ID NO: 3127 - RNA, 21 nt, Artificial Sequence
  Description of Artificial Sequence:  siNA antisense region
  misc_feature (20)..(21): n stands for thymidine
ugcccuggguuuugggcugnn

SEQ ID NO: 3128 - RNA, 21 nt, Artificial Sequence
  Description of Artificial Sequence:  siNA antisense region
  misc_feature (20)..(21): n stands for thymidine
uauuuguccuuuucuugccnn

SEQ ID NO: 3129 - RNA, 21 nt, Artificial Sequence
  Description of Artificial Sequence:  siNA antisense region
  misc_feature (20)..(21): n stands for thymidine
gcaucuuacuagaggagccnn

SEQ ID NO: 3130 - RNA, 21 nt, Artificial Sequence
  Description of Artificial Sequence:  siNA antisense region
  misc_feature (20)..(21): n stands for thymidine
aggccaucauggccuggagnn

SEQ ID NO: 3131 - RNA, 21 nt, Artificial Sequence
  Description of Artificial Sequence:  siNA antisense region
  misc_feature (20)..(21): n stands for thymidine
aaggccaucauggccuggann

SEQ ID NO: 3132 - RNA, 21 nt, Artificial Sequence
  Description of Artificial Sequence:  siNA antisense region
  misc_feature (20)..(21): n stands for thymidine
guugguauagagacggggunn

SEQ ID NO: 3133 - RNA, 21 nt, Artificial Sequence
  Description of Artificial Sequence:  siNA antisense region
  misc_feature (20)..(21): n stands for thymidine
ugguugguauagagacgggnn

SEQ ID NO: 3134 - RNA, 21 nt, Artificial Sequence
  Description of Artificial Sequence:  siNA antisense region
  misc_feature (20)..(21): n stands for thymidine
uugguugguauagagacggnn

SEQ ID NO: 3135 - RNA, 21 nt, Artificial Sequence
  Description of Artificial Sequence:  siNA antisense region
  misc_feature (20)..(21): n stands for thymidine
cgauccaaggcccacuugann

SEQ ID NO: 3136 - RNA, 21 nt, Artificial Sequence
  Description of Artificial Sequence:  siNA antisense region
  misc_feature (20)..(21): n stands for thymidine
gcgauccaaggcccacuugnn

SEQ ID NO: 3137 - RNA, 21 nt, Artificial Sequence
  Description of Artificial Sequence:  siNA sense region
  misc_feature (20)..(21): n stands for thymidine
gaacugaguuuaaaaggcann

SEQ ID NO: 3138 - RNA, 21 nt, Artificial Sequence
  Description of Artificial Sequence:  siNA antisense region
  misc_feature (20)..(21): n stands for thymidine
ugccuuuuaaacucaguucnn

SEQ ID NO: 3139 - RNA, 19 nt, Artificial Sequence
  Description of Artificial Sequence:  siNA sense region
cugaguuuaaaaggcaccc

SEQ ID NO: 3140 - RNA, 21 nt, Artificial Sequence
  Description of Artificial Sequence:  siNA antisense region
  misc_feature (1)..(1): 5'-3 attached terminal deoxyabasic moeity
  misc_feature (20)..(20): Phosphorothioate 3'-Internucleotide Linkage
  misc_feature (21)..(21): 3'-3 attached terminal deoxyabasic moeity
gggugccuuuuaaacucagnn

SEQ ID NO: 3141 - RNA, 19 nt, Artificial Sequence
  Description of Artificial Sequence:  siNA sense region
  misc_feature (1)..(1): 5'-3 attached terminal deoxyabasic moeity
gggugccuuuuaaacucag

SEQ ID NO: 3142 - RNA, 21 nt, Artificial Sequence
  Description of Artificial Sequence:  siNA sense region
  misc_feature (1)..(2): 2'-deoxy-2'-fluoro
  misc_feature (6)..(8): 2'-deoxy-2'-fluoro
  misc_feature (15)..(15): 2'-deoxy-2'-fluoro
  misc_feature (17)..(19): 2'-deoxy-2'-fluoro
  misc_feature (20)..(21): n stands for thymidine
cugaguuuaaaaggcacccnn

SEQ ID NO: 3143 - RNA, 19 nt, Artificial Sequence
  Description of Artificial Sequence:  siNA sense region
  misc_feature (1)..(2): 2'-deoxy-2'-fluoro
  misc_feature (6)..(8): 2'-deoxy-2'-fluoro
  misc_feature (15)..(15): 2'-deoxy-2'-fluoro
  misc_feature (17)..(19): 2'-deoxy-2'-fluoro
cugaguuuaaaaggcaccc

SEQ ID NO: 3144 - RNA, 19 nt, Artificial Sequence
  Description of Artificial Sequence:  siNA sense region
  misc_feature (1)..(3): 2'-O-methyl
  misc_feature (4)..(4): 2'-deoxy-2'-fluoro
  misc_feature (5)..(5): 2'-O-methyl
  misc_feature (6)..(11): 2'-deoxy-2'-fluoro
  misc_feature (12)..(14): 2'-O-methyl
  misc_feature (15)..(17): 2'-deoxy-2'-fluoro
  misc_feature (18)..(19): 2'-O-methyl
gggugccuuuuaaacucag

SEQ ID NO: 3145 - RNA, 21 nt, Artificial Sequence
  Description of Artificial Sequence:  siNA sense region
  misc_feature (1)..(1): 5'-3 attached terminal deoxyabasic moeity
  misc_feature (1)..(2): 2'-deoxy
  misc_feature (3)..(3): 2'-deoxy-2'-fluoro
  misc_feature (4)..(5): 2'-deoxy
  misc_feature (6)..(7): 2'-deoxy-2'-fluoro
  misc_feature (8)..(8): 2'-deoxy
  misc_feature (9)..(9): 2'-deoxy-2'-fluoro
  misc_feature (10)..(13): 2'-deoxy
  misc_feature (14)..(14): 2'-deoxy-2'-fluoro
  misc_feature (15)..(15): 2'-deoxy
  misc_feature (16)..(16): 2'-deoxy-2'-fluoro
  misc_feature (17)..(18): 2'-deoxy
  misc_feature (19)..(19): 2'-deoxy-2'-fluoro
  misc_feature (20)..(20): n stands for thymidine
  misc_feature (21)..(21): 3'-3 attached terminal deoxyabasic moeity
aacaaccacaaaauacaacnn

SEQ ID NO: 3146 - RNA, 21 nt, Artificial Sequence
  Description of Artificial Sequence:  siNA sense region
  misc_feature (1)..(1): 2'-deoxy
  misc_feature (1)..(1): 5'-3 attached terminal deoxyabasic moeity
  misc_feature (2)..(3): 2'-deoxy-2'-fluoro
  misc_feature (4)..(4): 2'-deoxy
  misc_feature (5)..(5): 2'-deoxy-2'-fluoro
  misc_feature (6)..(9): 2'-deoxy
  misc_feature (10)..(10): 2'-deoxy-2'-fluoro
  misc_feature (11)..(11): 2'-deoxy
  misc_feature (12)..(12): 2'-deoxy-2'-fluoro
  misc_feature (13)..(14): 2'-deoxy
  misc_feature (15)..(15): 2'-deoxy-2'-fluoro
  misc_feature (16)..(19): 2'-deoxy
  misc_feature (20)..(20): n stands for thymidine
  misc_feature (21)..(21): 3'-3 attached terminal deoxyabasic moeity
accacaaaauacaacaagann

SEQ ID NO: 3147 - RNA, 21 nt, Artificial Sequence
  Description of Artificial Sequence:  siNA sense region
  misc_feature (1)..(1): 5'-3 attached terminal deoxyabasic moeity
  misc_feature (1)..(4): 2'-deoxy
  misc_feature (5)..(6): 2'-deoxy-2'-fluoro
  misc_feature (7)..(7): 2'-deoxy
  misc_feature (8)..(11): 2'-deoxy-2'-fluoro
  misc_feature (12)..(15): 2'-deoxy
  misc_feature (16)..(17): 2'-deoxy-2'-fluoro
  misc_feature (18)..(19): 2'-deoxy
  misc_feature (20)..(20): n stands for thymidine
  misc_feature (21)..(21): 3'-3 attached terminal deoxyabasic moeity
ggaauuauuuuaggaccagnn

SEQ ID NO: 3148 - RNA, 21 nt, Artificial Sequence
  Description of Artificial Sequence:  siNA sense region
  misc_feature (1)..(1): 2'-deoxy-2'-fluoro
  misc_feature (1)..(1): 5'-3 attached terminal deoxyabasic moeity
  misc_feature (2)..(2): 2'-deoxy
  misc_feature (3)..(3): 2'-deoxy-2'-fluoro
  misc_feature (4)..(4): 2'-deoxy
  misc_feature (5)..(6): 2'-deoxy-2'-fluoro
  misc_feature (7)..(7): 2'-deoxy
  misc_feature (8)..(10): 2'-deoxy-2'-fluoro
  misc_feature (11)..(11): 2'-deoxy
  misc_feature (12)..(13): 2'-deoxy-2'-fluoro
  misc_feature (14)..(19): 2'-deoxy
  misc_feature (20)..(20): n stands for thymidine
  misc_feature (21)..(21): 3'-3 attached terminal deoxyabasic moeity
cacgcuguuuauugaaagann

SEQ ID NO: 3149 - RNA, 21 nt, Artificial Sequence
  Description of Artificial Sequence:  siNA sense region
  misc_feature (1)..(1): 5'-3 attached terminal deoxyabasic moeity
  misc_feature (1)..(1): 2'-deoxy
  misc_feature (2)..(2): 2'-deoxy-2'-fluoro
  misc_feature (3)..(3): 2'-deoxy
  misc_feature (4)..(5): 2'-deoxy-2'-fluoro
  misc_feature (6)..(6): 2'-deoxy
  misc_feature (7)..(9): 2'-deoxy-2'-fluoro
  misc_feature (10)..(10): 2'-deoxy
  misc_feature (11)..(12): 2'-deoxy-2'-fluoro
  misc_feature (13)..(19): 2'-deoxy
  misc_feature (20)..(20): n stands for thymidine
  misc_feature (21)..(21): 3'-3 attached terminal deoxyabasic moeity
acgcuguuuauugaaagagnn

SEQ ID NO: 3150 - RNA, 21 nt, Artificial Sequence
  Description of Artificial Sequence:  siNA sense region
  misc_feature (1)..(1): 2'-deoxy-2'-fluoro
  misc_feature (1)..(1): 5'-3 attached terminal deoxyabasic moeity
  misc_feature (2)..(2): 2'-deoxy
  misc_feature (3)..(4): 2'-deoxy-2'-fluoro
  misc_feature (5)..(5): 2'-deoxy
  misc_feature (6)..(8): 2'-deoxy-2'-fluoro
  misc_feature (9)..(9): 2'-deoxy
  misc_feature (10)..(11): 2'-deoxy-2'-fluoro
  misc_feature (12)..(18): 2'-deoxy
  misc_feature (19)..(19): 2'-deoxy-2'-fluoro
  misc_feature (20)..(20): n stands for thymidine
  misc_feature (21)..(21): 3'-3 attached terminal deoxyabasic moeity
cgcuguuuauugaaagagunn

SEQ ID NO: 3151 - RNA, 21 nt, Artificial Sequence
  Description of Artificial Sequence:  siNA sense region
  misc_feature (1)..(1): 5'-3 attached terminal deoxyabasic moeity
  misc_feature (1)..(1): 2'-deoxy
  misc_feature (2)..(3): 2'-deoxy-2'-fluoro
  misc_feature (4)..(4): 2'-deoxy
  misc_feature (5)..(7): 2'-deoxy-2'-fluoro
  misc_feature (8)..(8): 2'-deoxy
  misc_feature (9)..(10): 2'-deoxy-2'-fluoro
  misc_feature (11)..(17): 2'-deoxy
  misc_feature (18)..(19): 2'-deoxy-2'-fluoro
  misc_feature (20)..(20): n stands for thymidine
  misc_feature (21)..(21): 3'-3 attached terminal deoxyabasic moeity
gcuguuuauugaaagagucnn

SEQ ID NO: 3152 - RNA, 21 nt, Artificial Sequence
  Description of Artificial Sequence:  siNA sense region
  misc_feature (1)..(2): 2'-deoxy-2'-fluoro
  misc_feature (1)..(1): 5'-3 attached terminal deoxyabasic moeity
  misc_feature (3)..(3): 2'-deoxy
  misc_feature (4)..(6): 2'-deoxy-2'-fluoro
  misc_feature (7)..(7): 2'-deoxy
  misc_feature (8)..(9): 2'-deoxy-2'-fluoro
  misc_feature (10)..(16): 2'-deoxy
  misc_feature (18)..(18): 2'-deoxy-2'-fluoro
  misc_feature (19)..(19): 2'-deoxy
  misc_feature (20)..(20): n stands for thymidine
  misc_feature (21)..(21): 3'-3 attached terminal deoxyabasic moeity
cuguuuauugaaagagucann

SEQ ID NO: 3153 - RNA, 21 nt, Artificial Sequence
  Description of Artificial Sequence:  siNA sense region
  misc_feature (1)..(1): 2'-deoxy-2'-fluoro
  misc_feature (1)..(1): 5'-3 attached terminal deoxyabasic moeity
  misc_feature (2)..(2): 2'-deoxy
  misc_feature (3)..(5): 2'-deoxy-2'-fluoro
  misc_feature (6)..(6): 2'-deoxy
  misc_feature (7)..(8): 2'-deoxy-2'-fluoro
  misc_feature (9)..(15): 2'-deoxy
  misc_feature (16)..(17): 2'-deoxy-2'-fluoro
  misc_feature (18)..(18): 2'-deoxy
  misc_feature (19)..(19): 2'-deoxy-2'-fluoro
  misc_feature (20)..(20): n stands for thymidine
  misc_feature (21)..(21): 3'-3 attached terminal deoxyabasic moeity
uguuuauugaaagagucacnn

SEQ ID NO: 3154 - RNA, 21 nt, Artificial Sequence
  Description of Artificial Sequence:  siNA sense region
  misc_feature (1)..(1): 5'-3 attached terminal deoxyabasic moeity
  misc_feature (1)..(1): 2'-deoxy
  misc_feature (2)..(4): 2'-deoxy-2'-fluoro
  misc_feature (5)..(5): 2'-deoxy
  misc_feature (6)..(7): 2'-deoxy-2'-fluoro
  misc_feature (8)..(14): 2'-deoxy
  misc_feature (15)..(16): 2'-deoxy-2'-fluoro
  misc_feature (17)..(17): 2'-deoxy
  misc_feature (18)..(18): 2'-deoxy-2'-fluoro
  misc_feature (19)..(19): 2'-deoxy
  misc_feature (20)..(20): n stands for thymidine
  misc_feature (21)..(21): 3'-3 attached terminal deoxyabasic moeity
guuuauugaaagagucacann

SEQ ID NO: 3155 - RNA, 21 nt, Artificial Sequence
  Description of Artificial Sequence:  siNA sense region
  misc_feature (1)..(3): 2'-deoxy-2'-fluoro
  misc_feature (1)..(1): 5'-3 attached terminal deoxyabasic moeity
  misc_feature (4)..(4): 2'-deoxy
  misc_feature (5)..(6): 2'-deoxy-2'-fluoro
  misc_feature (7)..(13): 2'-deoxy
  misc_feature (14)..(15): 2'-deoxy-2'-fluoro
  misc_feature (16)..(16): 2'-deoxy
  misc_feature (17)..(17): 2'-deoxy-2'-fluoro
  misc_feature (18)..(19): 2'-deoxy
  misc_feature (20)..(20): n stands for thymidine
  misc_feature (21)..(21): 3'-3 attached terminal deoxyabasic moeity
uuuauugaaagagucacagnn

SEQ ID NO: 3156 - RNA, 21 nt, Artificial Sequence
  Description of Artificial Sequence:  siNA sense region
  misc_feature (1)..(1): 5'-3 attached terminal deoxyabasic moeity
  misc_feature (1)..(1): 2'-deoxy-2'-fluoro
  misc_feature (2)..(2): 2'-deoxy
  misc_feature (3)..(4): 2'-deoxy-2'-fluoro
  misc_feature (5)..(6): 2'-deoxy
  misc_feature (7)..(7): 2'-deoxy-2'-fluoro
  misc_feature (8)..(10): 2'-deoxy
  misc_feature (11)..(11): 2'-deoxy-2'-fluoro
  misc_feature (12)..(16): 2'-deoxy
  misc_feature (17)..(19): 2'-deoxy-2'-fluoro
  misc_feature (20)..(20): n stands for thymidine
  misc_feature (21)..(21): 3'-3 attached terminal deoxyabasic moeity
ugccagcaagugggaguuunn

SEQ ID NO: 3157 - RNA, 21 nt, Artificial Sequence
  Description of Artificial Sequence:  siNA sense region
  misc_feature (1)..(2): 2'-deoxy-2'-fluoro
  misc_feature (1)..(1): 5'-3 attached terminal deoxyabasic moeity
  misc_feature (3)..(4): 2'-deoxy
  misc_feature (5)..(5): 2'-deoxy-2'-fluoro
  misc_feature (6)..(8): 2'-deoxy
  misc_feature (9)..(9): 2'-deoxy-2'-fluoro
  misc_feature (10)..(14): 2'-deoxy
  misc_feature (15)..(17): 2'-deoxy-2'-fluoro
  misc_feature (18)..(18): 2'-deoxy
  misc_feature (19)..(19): 2'-deoxy-2'-fluoro
  misc_feature (20)..(20): n stands for thymidine
  misc_feature (21)..(21): 3'-3 attached terminal deoxyabasic moeity
ccagcaagugggaguuugcnn

SEQ ID NO: 3158 - RNA, 21 nt, Artificial Sequence
  Description of Artificial Sequence:  siNA sense region
  misc_feature (1)..(1): 5'-3 attached terminal deoxyabasic moeity
  misc_feature (1)..(1): 2'-deoxy
  misc_feature (2)..(2): 2'-deoxy-2'-fluoro
  misc_feature (3)..(3): 2'-deoxy
  misc_feature (4)..(6): 2'-deoxy-2'-fluoro
  misc_feature (7)..(8): 2'-deoxy
  misc_feature (9)..(9): 2'-deoxy-2'-fluoro
  misc_feature (10)..(10): 2'-deoxy
  misc_feature (11)..(12): 2'-deoxy-2'-fluoro
  misc_feature (13)..(18): 2'-deoxy
  misc_feature (19)..(19): 2'-deoxy-2'-fluoro
  misc_feature (20)..(20): n stands for thymidine
  misc_feature (21)..(21): 3'-3 attached terminal deoxyabasic moeity
gcauuuggcauuaagaaaunn

SEQ ID NO: 3159 - RNA, 21 nt, Artificial Sequence
  Description of Artificial Sequence:  siNA sense region
  misc_feature (1)..(1): 2'-deoxy-2'-fluoro
  misc_feature (1)..(1): 5'-3 attached terminal deoxyabasic moeity
  misc_feature (2)..(2): 2'-deoxy
  misc_feature (3)..(5): 2'-deoxy-2'-fluoro
  misc_feature (6)..(7): 2'-deoxy
  misc_feature (8)..(8): 2'-deoxy-2'-fluoro
  misc_feature (9)..(9): 2'-deoxy
  misc_feature (10)..(11): 2'-deoxy-2'-fluoro
  misc_feature (12)..(17): 2'-deoxy
  misc_feature (18)..(19): 2'-deoxy-2'-fluoro
  misc_feature (20)..(20): n stands for thymidine
  misc_feature (21)..(21): 3'-3 attached terminal deoxyabasic moeity
cauuuggcauuaagaaaucnn

SEQ ID NO: 3160 - RNA, 21 nt, Artificial Sequence
  Description of Artificial Sequence:  siNA sense region
  misc_feature (1)..(1): 5'-3 attached terminal deoxyabasic moeity
  misc_feature (1)..(3): 2'-deoxy-2'-fluoro
  misc_feature (4)..(5): 2'-deoxy
  misc_feature (6)..(6): 2'-deoxy-2'-fluoro
  misc_feature (7)..(7): 2'-deoxy
  misc_feature (8)..(9): 2'-deoxy-2'-fluoro
  misc_feature (10)..(15): 2'-deoxy
  misc_feature (16)..(17): 2'-deoxy-2'-fluoro
  misc_feature (18)..(18): 2'-deoxy
  misc_feature (19)..(19): 2'-deoxy-2'-fluoro
  misc_feature (20)..(20): n stands for thymidine
  misc_feature (21)..(21): 3'-3 attached terminal deoxyabasic moeity
uuuggcauuaagaaaucacnn

SEQ ID NO: 3161 - RNA, 21 nt, Artificial Sequence
  Description of Artificial Sequence:  siNA sense region
  misc_feature (1)..(2): 2'-deoxy-2'-fluoro
  misc_feature (1)..(1): 5'-3 attached terminal deoxyabasic moeity
  misc_feature (3)..(4): 2'-deoxy
  misc_feature (5)..(5): 2'-deoxy-2'-fluoro
  misc_feature (6)..(6): 2'-deoxy
  misc_feature (7)..(8): 2'-deoxy-2'-fluoro
  misc_feature (9)..(14): 2'-deoxy
  misc_feature (15)..(16): 2'-deoxy-2'-fluoro
  misc_feature (17)..(17): 2'-deoxy
  misc_feature (18)..(19): 2'-deoxy-2'-fluoro
  misc_feature (20)..(20): n stands for thymidine
  misc_feature (21)..(21): 3'-3 attached terminal deoxyabasic moeity
uuggcauuaagaaaucaccnn

SEQ ID NO: 3162 - RNA, 21 nt, Artificial Sequence
  Description of Artificial Sequence:  siNA sense region
  misc_feature (1)..(1): 5'-3 attached terminal deoxyabasic moeity
  misc_feature (1)..(1): 2'-deoxy-2'-fluoro
  misc_feature (2)..(2): 2'-deoxy
  misc_feature (3)..(4): 2'-deoxy-2'-fluoro
  misc_feature (5)..(7): 2'-deoxy
  misc_feature (8)..(9): 2'-deoxy-2'-fluoro
  misc_feature (10)..(10): 2'-deoxy
  misc_feature (11)..(11): 2'-deoxy-2'-fluoro
  misc_feature (12)..(13): 2'-deoxy
  misc_feature (14)..(15): 2'-deoxy-2'-fluoro
  misc_feature (16)..(16): 2'-deoxy
  misc_feature (17)..(17): 2'-deoxy-2'-fluoro
  misc_feature (18)..(19): 2'-deoxy
  misc_feature (20)..(20): n stands for thymidine
  misc_feature (21)..(21): 3'-3 attached terminal deoxyabasic moeity
ugccggacuguggcugugann

SEQ ID NO: 3163 - RNA, 21 nt, Artificial Sequence
  Description of Artificial Sequence:  siNA sense region
  misc_feature (1)..(3): 2'-deoxy
  misc_feature (1)..(1): 5'-3 attached terminal deoxyabasic moeity
  misc_feature (4)..(4): 2'-deoxy-2'-fluoro
  misc_feature (5)..(5): 2'-deoxy
  misc_feature (6)..(6): 2'-deoxy-2'-fluoro
  misc_feature (7)..(10): 2'-deoxy
  misc_feature (11)..(14): 2'-deoxy-2'-fluoro
  misc_feature (15)..(16): 2'-deoxy
  misc_feature (17)..(17): 2'-deoxy-2'-fluoro
  misc_feature (18)..(19): 2'-deoxy
  misc_feature (20)..(20): n stands for thymidine
  misc_feature (21)..(21): 3'-3 attached terminal deoxyabasic moeity
gaguacaaagcucugaugann

SEQ ID NO: 3164 - RNA, 21 nt, Artificial Sequence
  Description of Artificial Sequence:  siNA sense region
  misc_feature (1)..(1): 5'-3 attached terminal deoxyabasic moeity
  misc_feature (1)..(2): 2'-deoxy
  misc_feature (3)..(3): 2'-deoxy-2'-fluoro
  misc_feature (4)..(4): 2'-deoxy
  misc_feature (5)..(5): 2'-deoxy-2'-fluoro
  misc_feature (6)..(9): 2'-deoxy
  misc_feature (10)..(13): 2'-deoxy-2'-fluoro
  misc_feature (14)..(15): 2'-deoxy
  misc_feature (16)..(16): 2'-deoxy-2'-fluoro
  misc_feature (17)..(18): 2'-deoxy
  misc_feature (19)..(19): 2'-deoxy-2'-fluoro
  misc_feature (20)..(20): n stands for thymidine
  misc_feature (21)..(21): 3'-3 attached terminal deoxyabasic moeity
aguacaaagcucugaugacnn

SEQ ID NO: 3165 - RNA, 21 nt, Artificial Sequence
  Description of Artificial Sequence:  siNA sense region
  misc_feature (1)..(3): 2'-deoxy
  misc_feature (1)..(1): 5'-3 attached terminal deoxyabasic moeity
  misc_feature (4)..(4): 2'-deoxy-2'-fluoro
  misc_feature (5)..(12): 2'-deoxy
  misc_feature (13)..(17): 2'-deoxy-2'-fluoro
  misc_feature (18)..(19): 2'-deoxy
  misc_feature (20)..(20): n stands for thymidine
  misc_feature (21)..(21): 3'-3 attached terminal deoxyabasic moeity
aagcaaggagggccucugann

SEQ ID NO: 3166 - RNA, 21 nt, Artificial Sequence
  Description of Artificial Sequence:  siNA sense region
  misc_feature (1)..(1): 5'-3 attached terminal deoxyabasic moeity
  misc_feature (1)..(1): 2'-deoxy-2'-fluoro
  misc_feature (2)..(9): 2'-deoxy
  misc_feature (10)..(14): 2'-deoxy-2'-fluoro
  misc_feature (15)..(16): 2'-deoxy
  misc_feature (17)..(17): 2'-deoxy-2'-fluoro
  misc_feature (18)..(19): 2'-deoxy
  misc_feature (20)..(20): n stands for thymidine
  misc_feature (21)..(21): 3'-3 attached terminal deoxyabasic moeity
caaggagggccucugauggnn

SEQ ID NO: 3167 - RNA, 21 nt, Artificial Sequence
  Description of Artificial Sequence:  siNA sense region
  misc_feature (1)..(7): 2'-deoxy
  misc_feature (1)..(1): 5'-3 attached terminal deoxyabasic moeity
  misc_feature (8)..(12): 2'-deoxy-2'-fluoro
  misc_feature (13)..(14): 2'-deoxy
  misc_feature (15)..(15): 2'-deoxy-2'-fluoro
  misc_feature (16)..(17): 2'-deoxy
  misc_feature (18)..(18): 2'-deoxy-2'-fluoro
  misc_feature (19)..(19): 2'-deoxy
  misc_feature (20)..(20): n stands for thymidine
  misc_feature (21)..(21): 3'-3 attached terminal deoxyabasic moeity
aggagggccucugauggugnn

SEQ ID NO: 3168 - RNA, 21 nt, Artificial Sequence
  Description of Artificial Sequence:  siNA sense region
  misc_feature (1)..(1): 5'-3 attached terminal deoxyabasic moeity
  misc_feature (1)..(6): 2'-deoxy
  misc_feature (7)..(11): 2'-deoxy-2'-fluoro
  misc_feature (12)..(13): 2'-deoxy
  misc_feature (14)..(14): 2'-deoxy-2'-fluoro
  misc_feature (15)..(16): 2'-deoxy
  misc_feature (17)..(17): 2'-deoxy-2'-fluoro
  misc_feature (18)..(19): 2'-deoxy
  misc_feature (20)..(20): n stands for thymidine
  misc_feature (21)..(21): 3'-3 attached terminal deoxyabasic moeity
ggagggccucugauggugann

SEQ ID NO: 3169 - RNA, 21 nt, Artificial Sequence
  Description of Artificial Sequence:  siNA sense region
  misc_feature (1)..(5): 2'-deoxy
  misc_feature (1)..(1): 5'-3 attached terminal deoxyabasic moeity
  misc_feature (6)..(10): 2'-deoxy-2'-fluoro
  misc_feature (11)..(12): 2'-deoxy
  misc_feature (13)..(13): 2'-deoxy-2'-fluoro
  misc_feature (14)..(15): 2'-deoxy
  misc_feature (16)..(16): 2'-deoxy-2'-fluoro
  misc_feature (17)..(18): 2'-deoxy
  misc_feature (19)..(19): 2'-deoxy-2'-fluoro
  misc_feature (20)..(20): n stands for thymidine
  misc_feature (21)..(21): 3'-3 attached terminal deoxyabasic moeity
gagggccucugauggugaunn

SEQ ID NO: 3170 - RNA, 21 nt, Artificial Sequence
  Description of Artificial Sequence:  siNA sense region
  misc_feature (1)..(1): 5'-3 attached terminal deoxyabasic moeity
  misc_feature (1)..(1): 2'-deoxy-2'-fluoro
  misc_feature (2)..(4): 2'-deoxy
  misc_feature (5)..(5): 2'-deoxy-2'-fluoro
  misc_feature (6)..(7): 2'-deoxy
  misc_feature (8)..(9): 2'-deoxy-2'-fluoro
  misc_feature (10)..(14): 2'-deoxy
  misc_feature (15)..(15): 2'-deoxy-2'-fluoro
  misc_feature (16)..(16): 2'-deoxy
  misc_feature (17)..(17): 2'-deoxy-2'-fluoro
  misc_feature (18)..(19): 2'-deoxy
  misc_feature (20)..(20): n stands for thymidine
  misc_feature (21)..(21): 3'-3 attached terminal deoxyabasic moeity
caaguggccagaggcauggnn

SEQ ID NO: 3171 - RNA, 21 nt, Artificial Sequence
  Description of Artificial Sequence:  siNA sense region
  misc_feature (1)..(3): 2'-deoxy
  misc_feature (1)..(1): 5'-3 attached terminal deoxyabasic moeity
  misc_feature (4)..(4): 2'-deoxy-2'-fluoro
  misc_feature (5)..(6): 2'-deoxy
  misc_feature (7)..(8): 2'-deoxy-2'-fluoro
  misc_feature (9)..(13): 2'-deoxy
  misc_feature (14)..(14): 2'-deoxy-2'-fluoro
  misc_feature (15)..(15): 2'-deoxy
  misc_feature (16)..(16): 2'-deoxy-2'-fluoro
  misc_feature (17)..(19): 2'-deoxy
  misc_feature (20)..(20): n stands for thymidine
  misc_feature (21)..(21): 3'-3 attached terminal deoxyabasic moeity
aaguggccagaggcauggann

SEQ ID NO: 3172 - RNA, 21 nt, Artificial Sequence
  Description of Artificial Sequence:  siNA sense region
  misc_feature (20)..(21): n stands for thymidine
uggccagaggcauggaguunn

SEQ ID NO: 3173 - RNA, 21 nt, Artificial Sequence
  Description of Artificial Sequence:  siNA sense region
  misc_feature (1)..(1): 2'-deoxy
  misc_feature (1)..(1): 5'-3 attached terminal deoxyabasic moeity
  misc_feature (2)..(4): 2'-deoxy-2'-fluoro
  misc_feature (5)..(12): 2'-deoxy
  misc_feature (13)..(14): 2'-deoxy-2'-fluoro
  misc_feature (15)..(18): 2'-deoxy
  misc_feature (19)..(19): 2'-deoxy-2'-fluoro
  misc_feature (20)..(20): n stands for thymidine
  misc_feature (21)..(21): 3'-3 attached terminal deoxyabasic moeity
gccuggaaagaaucaaaacnn

SEQ ID NO: 3174 - RNA, 21 nt, Artificial Sequence
  Description of Artificial Sequence:  siNA sense region
  misc_feature (1)..(1): 5'-3 attached terminal deoxyabasic moeity
  misc_feature (1)..(4): 2'-deoxy-2'-fluoro
  misc_feature (5)..(6): 2'-deoxy
  misc_feature (7)..(8): 2'-deoxy-2'-fluoro
  misc_feature (9)..(10): 2'-deoxy
  misc_feature (11)..(11): 2'-deoxy-2'-fluoro
  misc_feature (12)..(16): 2'-deoxy
  misc_feature (17)..(17): 2'-deoxy-2'-fluoro
  misc_feature (18)..(18): 2'-deoxy
  misc_feature (19)..(19): 2'-deoxy-2'-fluoro
  misc_feature (20)..(20): n stands for thymidine
  misc_feature (21)..(21): 3'-3 attached terminal deoxyabasic moeity
uuuugacuaacaagaaugunn

SEQ ID NO: 3175 - RNA, 21 nt, Artificial Sequence
  Description of Artificial Sequence:  siNA antisense region
  misc_feature (4)..(8): 2'-deoxy-2'-fluoro
  misc_feature (9)..(11): 2'-O-methyl
  misc_feature (12)..(14): 2'-deoxy-2'-fluoro
  misc_feature (15)..(16): 2'-O-methyl
  misc_feature (17)..(19): 2'-deoxy-2'-fluoro
  misc_feature (20)..(21): n stands for thymidine
ugccuuuuaaacucaguucnn

SEQ ID NO: 3176 - RNA, 21 nt, Artificial Sequence
  Description of Artificial Sequence:  siNA antisense region
  misc_feature (4)..(9): 2'-deoxy-2'-fluoro
  misc_feature (10)..(12): 2'-O-methyl
  misc_feature (13)..(15): 2'-deoxy-2'-fluoro
  misc_feature (16)..(17): 2'-O-methyl
  misc_feature (18)..(19): 2'-deoxy-2'-fluoro
  misc_feature (20)..(21): n stands for thymidine
gugccuuuuaaacucaguunn

SEQ ID NO: 3177 - RNA, 21 nt, Artificial Sequence
  Description of Artificial Sequence:  siNA antisense region
  misc_feature (4)..(4): 2'-deoxy-2'-fluoro
  misc_feature (5)..(5): 2'-O-methyl
  misc_feature (6)..(11): 2'-deoxy-2'-fluoro
  misc_feature (12)..(14): 2'-O-methyl
  misc_feature (15)..(17): 2'-deoxy-2'-fluoro
  misc_feature (18)..(19): 2'-O-methyl
  misc_feature (20)..(21): n stands for thymidine
gggugccuuuuaaacucagnn

SEQ ID NO: 3178 - RNA, 21 nt, Artificial Sequence
  Description of Artificial Sequence:  siNA antisense region
  misc_feature (6)..(6): 2'-deoxy-2'-fluoro
  misc_feature (8)..(13): 2'-deoxy-2'-fluoro
  misc_feature (17)..(19): 2'-deoxy-2'-fluoro
  misc_feature (20)..(21): n stands for thymidine
cugggugccuuuuaaacucnn

SEQ ID NO: 3179 - RNA, 21 nt, Artificial Sequence
  Description of Artificial Sequence:  siNA antisense region
  misc_feature (4)..(4): 2'-deoxy-2'-fluoro
  misc_feature (5)..(7): 2'-O-methyl
  misc_feature (8)..(8): 2'-deoxy-2'-fluoro
  misc_feature (9)..(9): 2'-O-methyl
  misc_feature (10)..(15): 2'-deoxy-2'-fluoro
  misc_feature (16)..(18): 2'-O-methyl
  misc_feature (19)..(19): 2'-deoxy-2'-fluoro
  misc_feature (20)..(21): n stands for thymidine
ugcugggugccuuuuaaacnn

SEQ ID NO: 3180 - RNA, 21 nt, Artificial Sequence
  Description of Artificial Sequence:  siNA antisense region
  misc_feature (4)..(7): 2'-deoxy-2'-fluoro
  misc_feature (8)..(10): 2'-O-methyl
  misc_feature (11)..(19): 2'-deoxy-2'-fluoro
  misc_feature (20)..(21): n stands for thymidine
caguuucagguccucuccunn

SEQ ID NO: 3181 - RNA, 21 nt, Artificial Sequence
  Description of Artificial Sequence:  siNA antisense region
  misc_feature (4)..(4): 2'-O-methyl
  misc_feature (5)..(8): 2'-deoxy-2'-fluoro
  misc_feature (9)..(11): 2'-O-methyl
  misc_feature (12)..(19): 2'-deoxy-2'-fluoro
  misc_feature (20)..(21): n stands for thymidine
acaguuucagguccucuccnn

SEQ ID NO: 3182 - RNA, 21 nt, Artificial Sequence
  Description of Artificial Sequence:  siNA antisense region
  misc_feature (4)..(4): 2'-O-methyl
  misc_feature (5)..(5): 2'-deoxy-2'-fluoro
  misc_feature (6)..(6): 2'-O-methyl
  misc_feature (7)..(10): 2'-deoxy-2'-fluoro
  misc_feature (11)..(11): 2'-O-methyl
  misc_feature (12)..(12): 2'-deoxy-2'-fluoro
  misc_feature (13)..(14): 2'-O-methyl
  misc_feature (15)..(16): 2'-deoxy-2'-fluoro
  misc_feature (17)..(17): 2'-O-methyl
  misc_feature (18)..(19): 2'-deoxy-2'-fluoro
  misc_feature (20)..(21): n stands for thymidine
guuguauuuugugguuguunn

SEQ ID NO: 3183 - RNA, 21 nt, Artificial Sequence
  Description of Artificial Sequence:  siNA antisense region
  misc_feature (4)..(5): 2'-deoxy-2'-fluoro
  misc_feature (6)..(6): 2'-O-methyl
  misc_feature (7)..(7): 2'-deoxy-2'-fluoro
  misc_feature (8)..(8): 2'-O-methyl
  misc_feature (9)..(12): 2'-deoxy-2'-fluoro
  misc_feature (13)..(13): 2'-O-methyl
  misc_feature (14)..(14): 2'-deoxy-2'-fluoro
  misc_feature (15)..(16): 2'-O-methyl
  misc_feature (17)..(18): 2'-deoxy-2'-fluoro
  misc_feature (19)..(19): 2'-O-methyl
  misc_feature (20)..(21): n stands for thymidine
uuguuguauuuugugguugnn

SEQ ID NO: 3184 - RNA, 21 nt, Artificial Sequence
  Description of Artificial Sequence:  siNA antisense region
  misc_feature (4)..(4): 2'-deoxy-2'-fluoro
  misc_feature (5)..(5): 2'-O-methyl
  misc_feature (6)..(7): 2'-deoxy-2'-fluoro
  misc_feature (8)..(8): 2'-O-methyl
  misc_feature (9)..(9): 2'-deoxy-2'-fluoro
  misc_feature (10)..(10): 2'-O-methyl
  misc_feature (11)..(14): 2'-deoxy-2'-fluoro
  misc_feature (15)..(15): 2'-O-methyl
  misc_feature (16)..(16): 2'-deoxy-2'-fluoro
  misc_feature (17)..(18): 2'-O-methyl
  misc_feature (19)..(19): 2'-deoxy-2'-fluoro
  misc_feature (20)..(21): n stands for thymidine
ucuuguuguauuuuguggunn

SEQ ID NO: 3185 - RNA, 21 nt, Artificial Sequence
  Description of Artificial Sequence:  siNA antisense region
  misc_feature (4)..(4): 2'-O-methyl
  misc_feature (5)..(8): 2'-deoxy-2'-fluoro
  misc_feature (9)..(12): 2'-O-methyl
  misc_feature (13)..(13): 2'-deoxy-2'-fluoro
  misc_feature (14)..(15): 2'-O-methyl
  misc_feature (16)..(19): 2'-deoxy-2'-fluoro
  misc_feature (20)..(21): n stands for thymidine
cugguccuaaaauaauuccnn

SEQ ID NO: 3186 - RNA, 21 nt, Artificial Sequence
  Description of Artificial Sequence:  siNA antisense region
  misc_feature (4)..(6): 2'-deoxy-2'-fluoro
  misc_feature (7)..(8): 2'-O-methyl
  misc_feature (9)..(9): 2'-deoxy-2'-fluoro
  misc_feature (10)..(12): 2'-O-methyl
  misc_feature (13)..(13): 2'-deoxy-2'-fluoro
  misc_feature (14)..(15): 2'-O-methyl
  misc_feature (16)..(16): 2'-deoxy-2'-fluoro
  misc_feature (17)..(17): 2'-O-methyl
  misc_feature (18)..(18): 2'-deoxy-2'-fluoro
  misc_feature (19)..(19): 2'-O-methyl
  misc_feature (20)..(21): n stands for thymidine
ucuuucaauaaacagcgugnn

SEQ ID NO: 3187 - RNA, 21 nt, Artificial Sequence
  Description of Artificial Sequence:  siNA antisense region
  misc_feature (4)..(7): 2'-deoxy-2'-fluoro
  misc_feature (8)..(9): 2'-O-methyl
  misc_feature (10)..(10): 2'-deoxy-2'-fluoro
  misc_feature (11)..(13): 2'-O-methyl
  misc_feature (14)..(14): 2'-deoxy-2'-fluoro
  misc_feature (15)..(16): 2'-O-methyl
  misc_feature (17)..(17): 2'-deoxy-2'-fluoro
  misc_feature (18)..(18): 2'-O-methyl
  misc_feature (19)..(19): 2'-deoxy-2'-fluoro
  misc_feature (20)..(21): n stands for thymidine
cucuuucaauaaacagcgunn

SEQ ID NO: 3188 - RNA, 21 nt, Artificial Sequence
  Description of Artificial Sequence:  siNA antisense region
  misc_feature (4)..(8): 2'-deoxy-2'-fluoro
  misc_feature (9)..(10): 2'-O-methyl
  misc_feature (11)..(11): 2'-deoxy-2'-fluoro
  misc_feature (12)..(14): 2'-O-methyl
  misc_feature (15)..(15): 2'-deoxy-2'-fluoro
  misc_feature (16)..(17): 2'-O-methyl
  misc_feature (18)..(18): 2'-deoxy-2'-fluoro
  misc_feature (19)..(19): 2'-O-methyl
  misc_feature (20)..(21): n stands for thymidine
acucuuucaauaaacagcgnn

SEQ ID NO: 3189 - RNA, 21 nt, Artificial Sequence
  Description of Artificial Sequence:  siNA antisense region
  misc_feature (4)..(9): 2'-deoxy-2'-fluoro
  misc_feature (10)..(11): 2'-O-methyl
  misc_feature (12)..(12): 2'-deoxy-2'-fluoro
  misc_feature (13)..(15): 2'-O-methyl
  misc_feature (16)..(16): 2'-deoxy-2'-fluoro
  misc_feature (17)..(18): 2'-O-methyl
  misc_feature (19)..(19): 2'-deoxy-2'-fluoro
  misc_feature (20)..(21): n stands for thymidine
gacucuuucaauaaacagcnn

SEQ ID NO: 3190 - RNA, 21 nt, Artificial Sequence
  Description of Artificial Sequence:  siNA antisense region
  misc_feature (4)..(10): 2'-deoxy-2'-fluoro
  misc_feature (11)..(12): 2'-O-methyl
  misc_feature (13)..(13): 2'-deoxy-2'-fluoro
  misc_feature (14)..(16): 2'-O-methyl
  misc_feature (17)..(17): 2'-deoxy-2'-fluoro
  misc_feature (18)..(19): 2'-O-methyl
  misc_feature (20)..(21): n stands for thymidine
ugacucuuucaauaaacagnn

SEQ ID NO: 3191 - RNA, 21 nt, Artificial Sequence
  Description of Artificial Sequence:  siNA antisense region
  misc_feature (4)..(4): 2'-O-methyl
  misc_feature (5)..(11): 2'-deoxy-2'-fluoro
  misc_feature (12)..(13): 2'-O-methyl
  misc_feature (14)..(14): 2'-deoxy-2'-fluoro
  misc_feature (15)..(17): 2'-O-methyl
  misc_feature (18)..(18): 2'-deoxy-2'-fluoro
  misc_feature (19)..(19): 2'-O-methyl
  misc_feature (20)..(21): n stands for thymidine
gugacucuuucaauaaacann

SEQ ID NO: 3192 - RNA, 21 nt, Artificial Sequence
  Description of Artificial Sequence:  siNA antisense region
  misc_feature (4)..(5): 2'-O-methyl
  misc_feature (6)..(12): 2'-deoxy-2'-fluoro
  misc_feature (13)..(14): 2'-O-methyl
  misc_feature (15)..(15): 2'-deoxy-2'-fluoro
  misc_feature (16)..(18): 2'-O-methyl
  misc_feature (19)..(19): 2'-deoxy-2'-fluoro
  misc_feature (20)..(21): n stands for thymidine
ugugacucuuucaauaaacnn

SEQ ID NO: 3193 - RNA, 21 nt, Artificial Sequence
  Description of Artificial Sequence:  siNA antisense region
  misc_feature (4)..(4): 2'-deoxy-2'-fluoro
  misc_feature (5)..(6): 2'-O-methyl
  misc_feature (7)..(13): 2'-deoxy-2'-fluoro
  misc_feature (14)..(15): 2'-O-methyl
  misc_feature (16)..(16): 2'-deoxy-2'-fluoro
  misc_feature (17)..(19): 2'-O-methyl
  misc_feature (20)..(21): n stands for thymidine
cugugacucuuucaauaaann

SEQ ID NO: 3194 - RNA, 21 nt, Artificial Sequence
  Description of Artificial Sequence:  siNA antisense region
  misc_feature (4)..(8): 2'-deoxy-2'-fluoro
  misc_feature (9)..(9): 2'-O-methyl
  misc_feature (10)..(12): 2'-deoxy-2'-fluoro
  misc_feature (13)..(13): 2'-O-methyl
  misc_feature (14)..(15): 2'-deoxy-2'-fluoro
  misc_feature (16)..(17): 2'-O-methyl
  misc_feature (18)..(18): 2'-deoxy-2'-fluoro
  misc_feature (19)..(19): 2'-O-methyl
  misc_feature (20)..(21): n stands for thymidine
aaacucccacuugcuggcann

SEQ ID NO: 3195 - RNA, 21 nt, Artificial Sequence
  Description of Artificial Sequence:  siNA antisense region
  misc_feature (4)..(5): 2'-O-methyl
  misc_feature (6)..(10): 2'-deoxy-2'-fluoro
  misc_feature (11)..(11): 2'-O-methyl
  misc_feature (12)..(14): 2'-deoxy-2'-fluoro
  misc_feature (15)..(15): 2'-O-methyl
  misc_feature (16)..(17): 2'-deoxy-2'-fluoro
  misc_feature (18)..(19): 2'-O-methyl
  misc_feature (20)..(21): n stands for thymidine
gcaaacucccacuugcuggnn

SEQ ID NO: 3196 - RNA, 21 nt, Artificial Sequence
  Description of Artificial Sequence:  siNA antisense region
  misc_feature (4)..(7): 2'-deoxy-2'-fluoro
  misc_feature (8)..(9): 2'-O-methyl
  misc_feature (10)..(10): 2'-deoxy-2'-fluoro
  misc_feature (11)..(11): 2'-O-methyl
  misc_feature (12)..(13): 2'-deoxy-2'-fluoro
  misc_feature (14)..(16): 2'-O-methyl
  misc_feature (17)..(17): 2'-deoxy-2'-fluoro
  misc_feature (18)..(18): 2'-O-methyl
  misc_feature (19)..(19): 2'-deoxy-2'-fluoro
  misc_feature (20)..(21): n stands for thymidine
auuucuuaaugccaaaugcnn

SEQ ID NO: 3197 - RNA, 21 nt, Artificial Sequence
  Description of Artificial Sequence:  siNA antisense region
  misc_feature (4)..(8): 2'-deoxy-2'-fluoro
  misc_feature (9)..(10): 2'-O-methyl
  misc_feature (11)..(11): 2'-deoxy-2'-fluoro
  misc_feature (12)..(12): 2'-O-methyl
  misc_feature (13)..(14): 2'-deoxy-2'-fluoro
  misc_feature (15)..(17): 2'-O-methyl
  misc_feature (18)..(18): 2'-deoxy-2'-fluoro
  misc_feature (19)..(19): 2'-O-methyl
  misc_feature (20)..(21): n stands for thymidine
gauuucuuaaugccaaaugnn

SEQ ID NO: 3198 - RNA, 21 nt, Artificial Sequence
  Description of Artificial Sequence:  siNA antisense region
  misc_feature (4)..(9): 2'-deoxy-2'-fluoro
  misc_feature (10)..(11): 2'-O-methyl
  misc_feature (12)..(12): 2'-deoxy-2'-fluoro
  misc_feature (13)..(13): 2'-O-methyl
  misc_feature (14)..(15): 2'-deoxy-2'-fluoro
  misc_feature (16)..(18): 2'-O-methyl
  misc_feature (19)..(19): 2'-deoxy-2'-fluoro
  misc_feature (20)..(21): n stands for thymidine
ugauuucuuaaugccaaaunn

SEQ ID NO: 3199 - RNA, 21 nt, Artificial Sequence
  Description of Artificial Sequence:  siNA antisense region
  misc_feature (5)..(10): 2'-deoxy-2'-fluoro
  misc_feature (13)..(13): 2'-deoxy-2'-fluoro
  misc_feature (15)..(16): 2'-deoxy-2'-fluoro
  misc_feature (20)..(21): n stands for thymidine
gugauuucuuaaugccaaann

SEQ ID NO: 3200 - RNA, 21 nt, Artificial Sequence
  Description of Artificial Sequence:  siNA antisense region
  misc_feature (4)..(5): 2'-O-methyl
  misc_feature (6)..(11): 2'-deoxy-2'-fluoro
  misc_feature (12)..(13): 2'-O-methyl
  misc_feature (14)..(14): 2'-deoxy-2'-fluoro
  misc_feature (15)..(15): 2'-O-methyl
  misc_feature (16)..(17): 2'-deoxy-2'-fluoro
  misc_feature (18)..(19): 2'-O-methyl
  misc_feature (20)..(21): n stands for thymidine
ggugauuucuuaaugccaann

SEQ ID NO: 3201 - RNA, 21 nt, Artificial Sequence
  Description of Artificial Sequence:  siNA antisense region
  misc_feature (4)..(4): 2'-deoxy-2'-fluoro
  misc_feature (5)..(6): 2'-O-methyl
  misc_feature (7)..(8): 2'-deoxy-2'-fluoro
  misc_feature (9)..(9): 2'-O-methyl
  misc_feature (10)..(10): 2'-deoxy-2'-fluoro
  misc_feature (11)..(12): 2'-O-methyl
  misc_feature (13)..(15): 2'-deoxy-2'-fluoro
  misc_feature (16)..(17): 2'-O-methyl
  misc_feature (18)..(18): 2'-deoxy-2'-fluoro
  misc_feature (19)..(19): 2'-O-methyl
  misc_feature (20)..(21): n stands for thymidine
ucacagccacaguccggcann

SEQ ID NO: 3202 - RNA, 21 nt, Artificial Sequence
  Description of Artificial Sequence:  siNA antisense region
  misc_feature (4)..(5): 2'-deoxy-2'-fluoro
  misc_feature (6)..(9): 2'-O-methyl
  misc_feature (10)..(13): 2'-deoxy-2'-fluoro
  misc_feature (14)..(14): 2'-O-methyl
  misc_feature (15)..(15): 2'-deoxy-2'-fluoro
  misc_feature (16)..(16): 2'-O-methyl
  misc_feature (17)..(19): 2'-deoxy-2'-fluoro
  misc_feature (20)..(21): n stands for thymidine
ucaucagagcuuuguacucnn

SEQ ID NO: 3203 - RNA, 21 nt, Artificial Sequence
  Description of Artificial Sequence:  siNA antisense region
  misc_feature (4)..(4): 2'-O-methyl
  misc_feature (5)..(6): 2'-deoxy-2'-fluoro
  misc_feature (7)..(10): 2'-O-methyl
  misc_feature (11)..(14): 2'-deoxy-2'-fluoro
  misc_feature (15)..(15): 2'-O-methyl
  misc_feature (16)..(16): 2'-deoxy-2'-fluoro
  misc_feature (17)..(17): 2'-O-methyl
  misc_feature (18)..(19): 2'-deoxy-2'-fluoro
  misc_feature (20)..(21): n stands for thymidine
gucaucagagcuuuguacunn

SEQ ID NO: 3204 - RNA, 21 nt, Artificial Sequence
  Description of Artificial Sequence:  siNA antisense region
  misc_feature (4)..(7): 2'-O-methyl
  misc_feature (8)..(15): 2'-deoxy-2'-fluoro
  misc_feature (16)..(16): 2'-O-methyl
  misc_feature (17)..(19): 2'-deoxy-2'-fluoro
  misc_feature (20)..(21): n stands for thymidine
ucagaggcccuccuugcuunn

SEQ ID NO: 3205 - RNA, 21 nt, Artificial Sequence
  Description of Artificial Sequence:  siNA antisense region
  misc_feature (4)..(4): 2'-deoxy-2'-fluoro
  misc_feature (5)..(9): 2'-O-methyl
  misc_feature (10)..(17): 2'-deoxy-2'-fluoro
  misc_feature (18)..(18): 2'-O-methyl
  misc_feature (19)..(19): 2'-deoxy-2'-fluoro
  misc_feature (20)..(21): n stands for thymidine
caucagaggcccuccuugcnn

SEQ ID NO: 3206 - RNA, 21 nt, Artificial Sequence
  Description of Artificial Sequence:  siNA antisense region
  misc_feature (4)..(5): 2'-deoxy-2'-fluoro
  misc_feature (6)..(10): 2'-O-methyl
  misc_feature (11)..(18): 2'-deoxy-2'-fluoro
  misc_feature (19)..(19): 2'-O-methyl
  misc_feature (20)..(21): n stands for thymidine
ccaucagaggcccuccuugnn

SEQ ID NO: 3207 - RNA, 21 nt, Artificial Sequence
  Description of Artificial Sequence:  siNA antisense region
  misc_feature (4)..(4): 2'-deoxy-2'-fluoro
  misc_feature (5)..(5): 2'-O-methyl
  misc_feature (6)..(7): 2'-deoxy-2'-fluoro
  misc_feature (8)..(12): 2'-O-methyl
  misc_feature (13)..(19): 2'-deoxy-2'-fluoro
  misc_feature (20)..(21): n stands for thymidine
caccaucagaggcccuccunn

SEQ ID NO: 3208 - RNA, 21 nt, Artificial Sequence
  Description of Artificial Sequence:  siNA antisense region
  misc_feature (4)..(5): 2'-deoxy-2'-fluoro
  misc_feature (6)..(6): 2'-O-methyl
  misc_feature (7)..(8): 2'-deoxy-2'-fluoro
  misc_feature (9)..(13): 2'-O-methyl
  misc_feature (14)..(19): 2'-deoxy-2'-fluoro
  misc_feature (20)..(21): n stands for thymidine
ucaccaucagaggcccuccnn

SEQ ID NO: 3209 - RNA, 21 nt, Artificial Sequence
  Description of Artificial Sequence:  siNA antisense region
  misc_feature (4)..(4): 2'-O-methyl4
  misc_feature (5)..(6): 2'-deoxy-2'-fluoro
  misc_feature (7)..(7): 2'-O-methyl4
  misc_feature (8)..(9): 2'-deoxy-2'-fluoro
  misc_feature (10)..(14): 2'-O-methyl4
  misc_feature (15)..(19): 2'-deoxy-2'-fluoro
  misc_feature (20)..(21): n stands for thymidine
aucaccaucagaggcccucnn

SEQ ID NO: 3210 - RNA, 21 nt, Artificial Sequence
  Description of Artificial Sequence:  siNA antisense region
  misc_feature (4)..(4): 2'-deoxy-2'-fluoro
  misc_feature (5)..(5): 2'-O-methyl
  misc_feature (6)..(10): 2'-deoxy-2'-fluoro
  misc_feature (11)..(12): 2'-O-methyl
  misc_feature (13)..(14): 2'-deoxy-2'-fluoro
  misc_feature (15)..(15): 2'-O-methyl
  misc_feature (16)..(18): 2'-deoxy-2'-fluoro
  misc_feature (19)..(19): 2'-O-methyl
  misc_feature (20)..(21): n stands for thymidine
ccaugccucuggccacuugnn

SEQ ID NO: 3211 - RNA, 21 nt, Artificial Sequence
  Description of Artificial Sequence:  siNA antisense region
  misc_feature (4)..(4): 2'-O-methyl
  misc_feature (5)..(5): 2'-deoxy-2'-fluoro
  misc_feature (6)..(6): 2'-O-methyl
  misc_feature (7)..(11): 2'-deoxy-2'-fluoro
  misc_feature (12)..(13): 2'-O-methyl
  misc_feature (14)..(15): 2'-deoxy-2'-fluoro
  misc_feature (16)..(16): 2'-O-methyl
  misc_feature (17)..(19): 2'-deoxy-2'-fluoro
  misc_feature (20)..(21): n stands for thymidine
uccaugccucuggccacuunn

SEQ ID NO: 3212 - RNA, 21 nt, Artificial Sequence
  Description of Artificial Sequence:  siNA antisense region
  misc_feature (4)..(6): 2'-deoxy-2'-fluoro
  misc_feature (7)..(7): 2'-O-methyl
  misc_feature (8)..(8): 2'-deoxy-2'-fluoro
  misc_feature (9)..(9): 2'-O-methyl
  misc_feature (10)..(14): 2'-deoxy-2'-fluoro
  misc_feature (15)..(16): 2'-O-methyl
  misc_feature (17)..(18): 2'-deoxy-2'-fluoro
  misc_feature (19)..(19): 2'-O-methyl
  misc_feature (20)..(21): n stands for thymidine
aacuccaugccucuggccann

SEQ ID NO: 3213 - RNA, 21 nt, Artificial Sequence
  Description of Artificial Sequence:  siNA antisense region
  misc_feature (4)..(5): 2'-deoxy-2'-fluoro
  misc_feature (6)..(7): 2'-O-methyl
  misc_feature (8)..(15): 2'-deoxy-2'-fluoro
  misc_feature (16)..(18): 2'-O-methyl
  misc_feature (19)..(19): 2'-deoxy-2'-fluoro
  misc_feature (20)..(21): n stands for thymidine
guuuugauucuuuccaggcnn

SEQ ID NO: 3214 - RNA, 21 nt, Artificial Sequence
  Description of Artificial Sequence:  siNA antisense region
  misc_feature (4)..(8): 2'-deoxy-2'-fluoro
  misc_feature (9)..(9): 2'-O-methyl
  misc_feature (10)..(11): 2'-deoxy-2'-fluoro
  misc_feature (12)..(13): 2'-O-methyl
  misc_feature (14)..(15): 2'-deoxy-2'-fluoro
  misc_feature (16)..(19): 2'-O-methyl
  misc_feature (20)..(21): n stands for thymidine
acauucuuguuagucaaaann

SEQ ID NO: 3215 - RNA, 21 nt, Artificial Sequence
  Description of Artificial Sequence:  siNA antisense region
  misc_feature (4)..(4): 2'-O-methyl
  misc_feature (5)..(6): 2'-deoxy-2'-fluoro
  misc_feature (7)..(8): 2'-O-methyl
  misc_feature (9)..(9): 2'-deoxy-2'-fluoro
  misc_feature (10)..(11): 2'-O-methyl
  misc_feature (12)..(14): 2'-deoxy-2'-fluoro
  misc_feature (15)..(16): 2'-O-methyl
  misc_feature (17)..(17): 2'-deoxy-2'-fluoro
  misc_feature (18)..(18): 2'-O-methyl
  misc_feature (19)..(19): 2'-deoxy-2'-fluoro
  misc_feature (20)..(21): n stands for thymidine
ugugccagcaguccagcaunn

SEQ ID NO: 3216 - RNA, 21 nt, Artificial Sequence
  Description of Artificial Sequence:  siNA sense region
  misc_feature (2)..(2): inverted deoxyabasic moeity
  misc_feature (20)..(20): n stands for thymidine
  misc_feature (21)..(21): 3'-3 attached terminal deoxyabasic moeity
cugaguuuaaaaggcacccnn

SEQ ID NO: 3217 - RNA, 21 nt, Artificial Sequence
  Description of Artificial Sequence:  siNA sense region
  misc_feature (2)..(5): 2'-deoxy-2'-Fluoro
  misc_feature (10)..(10): 2'-deoxy-2'-Fluoro
  misc_feature (12)..(15): 2'-deoxy-2'-Fluoro
  misc_feature (17)..(19): 2'-deoxy-2'-Fluoro
  misc_feature (1)..(1): 5'-3 attached terminal deoxyabasic moeity
  misc_feature (21)..(21): 3'-3 attached terminal deoxyabasic moeity
  misc_feature (20)..(21): n stands for thymidine
accuuggagcaucucaucunn

SEQ ID NO: 3218 - RNA, 21 nt, Artificial Sequence
  Description of Artificial Sequence:  siNA sense region
  misc_feature (1)..(1): 5'-3 attached terminal deoxyabasic moeity
  misc_feature (2)..(4): 2'-deoxy-2'-fluoro
  misc_feature (6)..(11): 2'-deoxy-2'-fluoro
  misc_feature (13)..(13): 2'-deoxy-2'-fluoro
  misc_feature (15)..(15): 2'-deoxy-2'-fluoro
  misc_feature (20)..(21): n stands for thymidine
  misc_feature (21)..(21): 3'-3 attached terminal deoxyabasic moeity
accuguuuccuguauggagnn

SEQ ID NO: 3219 - RNA, 21 nt, Artificial Sequence
  Description of Artificial Sequence:  siNA antisense region
  misc_feature (4)..(4): 2'-deoxy-2'-fluoro
  misc_feature (9)..(9): 2'-deoxy-2'-fluoro
  misc_feature (11)..(14): 2'-deoxy-2'-fluoro
  misc_feature (19)..(19): 2'-deoxy-2'-fluoro
  misc_feature (20)..(21): n stands for thymidine
  misc_feature (20)..(20): Phosphorothioate 3'-Internucleotide Linkage
agaugagaugcuccaaggunn

SEQ ID NO: 3220 - RNA, 21 nt, Artificial Sequence
  Description of Artificial Sequence:  siNA antisense region
  misc_feature (1)..(4): 2'-deoxy-2'-fluoro
  misc_feature (6)..(6): 2'-deoxy-2'-fluoro
  misc_feature (8)..(8): 2'-deoxy-2'-fluoro
  misc_feature (15)..(15): 2'-deoxy-2'-fluoro
  misc_feature (19)..(19): 2'-deoxy-2'-fluoro
  misc_feature (20)..(21): n stands for thymidine
  misc_feature (20)..(20): Phosphorothioate 3'-Internucleotide Linkage
cuccauacaggaaacaggunn

SEQ ID NO: 3221 - RNA, 21 nt, Artificial Sequence
  Description of Artificial Sequence:  siNA sense region
  misc_feature (1)..(1): 2'-deoxy
  misc_feature (1)..(1): 5'-3 attached terminal deoxyabasic moeity
  misc_feature (2)..(5): 2'-deoxy-2'-fluoro
  misc_feature (6)..(9): 2'-deoxy
  misc_feature (10)..(10): 2'-deoxy-2'-fluoro
  misc_feature (11)..(11): 2'-deoxy
  misc_feature (12)..(15): 2'-deoxy-2'-fluoro
  misc_feature (16)..(16): 2'-deoxy
  misc_feature (17)..(19): 2'-deoxy-2'-fluoro
  misc_feature (20)..(21): n stands for thymidine
  misc_feature (21)..(21): 3'-3 attached terminal deoxyabasic moeity
accuuggagcaucucaucunn

SEQ ID NO: 3222 - RNA, 21 nt, Artificial Sequence
  Description of Artificial Sequence:  siNA sense region
  misc_feature (1)..(1): 2'-deoxy
  misc_feature (1)..(1): 5'-3 attached terminal deoxyabasic moeity
  misc_feature (2)..(4): 2'-deoxy-2'-fluoro
  misc_feature (5)..(5): 2'-deoxy
  misc_feature (6)..(11): 2'-deoxy-2'-fluoro
  misc_feature (12)..(12): 2'-deoxy
  misc_feature (13)..(13): 2'-deoxy-2'-fluoro
  misc_feature (14)..(14): 2'-deoxy
  misc_feature (15)..(15): 2'-deoxy-2'-fluoro
  misc_feature (16)..(19): 2'-deoxy
  misc_feature (20)..(21): n stands for thymidine
  misc_feature (21)..(21): 3'-3 attached terminal deoxyabasic moeity
accuguuuccuguauggagnn

SEQ ID NO: 3223 - RNA, 21 nt, Artificial Sequence
  Description of Artificial Sequence:  siNA antisense region
  misc_feature (1)..(3): 2'-deoxy
  misc_feature (4)..(4): 2'-deoxy-2'-fluoro
  misc_feature (5)..(8): 2'-deoxy
  misc_feature (9)..(9): 2'-deoxy-2'-fluoro
  misc_feature (10)..(10): 2'-deoxy
  misc_feature (11)..(14): 2'-deoxy-2'-fluoro
  misc_feature (15)..(18): 2'-deoxy
  misc_feature (19)..(19): 2'-deoxy-2'-fluoro
  misc_feature (20)..(21): n stands for thymidine
  misc_feature (20)..(20): Phosphorothioate 3'-Internucleotide Linkage
agaugagaugcuccaaggunn

SEQ ID NO: 3224 - RNA, 21 nt, Artificial Sequence
  Description of Artificial Sequence:  siNA antisense region
  misc_feature (1)..(3): 2'-deoxy
  misc_feature (4)..(12): 2'-deoxy-2'-fluoro
  misc_feature (13)..(13): 2'-deoxy
  misc_feature (14)..(14): 2'-deoxy-2'-fluoro
  misc_feature (15)..(15): 2'-deoxy
  misc_feature (16)..(18): 2'-deoxy-2'-fluoro
  misc_feature (19)..(19): 2'-deoxy
  misc_feature (20)..(21): n stands for thymidine
  misc_feature (20)..(20): Phosphorothioate 3'-Internucleotide Linkage
gaauccucuuccaugcucann

SEQ ID NO: 3225 - RNA, 21 nt, Artificial Sequence
  Description of Artificial Sequence:  siNA antisense region
  misc_feature (1)..(4): 2'-deoxy-2'-fluoro
  misc_feature (5)..(5): 2'-deoxy
  misc_feature (6)..(6): 2'-deoxy-2'-fluoro
  misc_feature (7)..(7): 2'-deoxy
  misc_feature (8)..(8): 2'-deoxy-2'-fluoro
  misc_feature (9)..(14): 2'-deoxy
  misc_feature (15)..(15): 2'-deoxy-2'-fluoro
  misc_feature (16)..(18): 2'-deoxy
  misc_feature (19)..(19): 2'-deoxy-2'-fluoro
  misc_feature (20)..(21): n stands for thymidine
  misc_feature (20)..(20): Phosphorothioate 3'-Internucleotide Linkage
cuccauacaggaaacaggunn

SEQ ID NO: 3226 - RNA, 21 nt, Artificial Sequence
  Description of Artificial Sequence:  siNA antisense region
  misc_feature (1)..(1): 2'-deoxy
  misc_feature (2)..(3): 2'-deoxy-2'-fluoro
  misc_feature (4)..(5): 2'-deoxy
  misc_feature (6)..(10): 2'-deoxy-2'-fluoro
  misc_feature (11)..(11): 2'-deoxy
  misc_feature (12)..(13): 2'-deoxy-2'-fluoro
  misc_feature (14)..(14): 2'-deoxy
  misc_feature (15)..(15): 2'-deoxy-2'-fluoro
  misc_feature (16)..(16): 2'-deoxy
  misc_feature (17)..(18): 2'-deoxy-2'-fluoro
  misc_feature (19)..(19): 2'-deoxy
  misc_feature (20)..(21): n stands for thymidine
  misc_feature (20)..(20): Phosphorothioate 3'-Internucleotide Linkage
acugauuccugcuguguugnn

SEQ ID NO: 3227 - RNA, 21 nt, Artificial Sequence
  Description of Artificial Sequence:  siNA sense region
  misc_feature (1)..(3): 2'-deoxy-2'-fluoro
  misc_feature (1)..(1): 5'-3 attached terminal deoxyabasic moeity
  misc_feature (5)..(7): 2'-deoxy-2'-fluoro
  misc_feature (9)..(11): 2'-deoxy-2'-fluoro
  misc_feature (18)..(18): 2'-deoxy-2'-fluoro
  misc_feature (20)..(21): n stands for thymidine
  misc_feature (21)..(21): 3'-3 attached terminal deoxyabasic moeity
uccacuuaccugaggagcann

SEQ ID NO: 3228 - RNA, 21 nt, Artificial Sequence
  Description of Artificial Sequence:  siNA sense region
  misc_feature (1)..(1): 2'-deoxy-2'-fluoro
  misc_feature (1)..(1): 5'-3 attached terminal deoxyabasic moeity
  misc_feature (5)..(5): 2'-deoxy-2'-fluoro
  misc_feature (7)..(7): 2'-deoxy-2'-fluoro
  misc_feature (17)..(19): 2'-deoxy-2'-fluoro
  misc_feature (20)..(21): n stands for thymidine
  misc_feature (21)..(21): 3'-3 attached terminal deoxyabasic moeity
ugagcauggaagaggauucnn

SEQ ID NO: 3229 - RNA, 21 nt, Artificial Sequence
  Description of Artificial Sequence:  siNA sense region
  misc_feature (1)..(1): 5'-3 attached terminal deoxyabasic moeity
  misc_feature (3)..(7): 2'-deoxy-2'-fluoro
  misc_feature (9)..(12): 2'-deoxy-2'-fluoro
  misc_feature (20)..(21): n stands for thymidine
  misc_feature (21)..(21): 3'-3 attached terminal deoxyabasic moeity
gguucuugccucagaagagnn

SEQ ID NO: 3230 - RNA, 21 nt, Artificial Sequence
  Description of Artificial Sequence:  siNA sense region
  misc_feature (1)..(1): 2'-deoxy-2'-fluoro
  misc_feature (1)..(1): 5'-3 attached terminal deoxyabasic moeity
  misc_feature (7)..(9): 2'-deoxy-2'-fluoro
  misc_feature (13)..(14): 2'-deoxy-2'-fluoro
  misc_feature (18)..(18): 2'-deoxy-2'-fluoro
  misc_feature (20)..(21): n stands for thymidine
  misc_feature (21)..(21): 3'-3 attached terminal deoxyabasic moeity
ugaaggcucaaaccagacann

SEQ ID NO: 3231 - RNA, 21 nt, Artificial Sequence
  Description of Artificial Sequence:  siNA antisense region
  misc_feature (1)..(1): 2'-deoxy-2'-fluoro
  misc_feature (3)..(8): 2'-deoxy-2'-fluoro
  misc_feature (12)..(12): 2'-deoxy-2'-fluoro
  misc_feature (16)..(16): 2'-deoxy-2'-fluoro
  misc_feature (20)..(21): n stands for thymidine
  misc_feature (20)..(20): Phosphorothioate 3'-Internucleotide Linkage
ugcuccucagguaaguggann

SEQ ID NO: 3232 - RNA, 21 nt, Artificial Sequence
  Description of Artificial Sequence:  siNA antisense region
  misc_feature (4)..(12): 2'-deoxy-2'-fluoro
  misc_feature (14)..(14): 2'-deoxy-2'-fluoro
  misc_feature (16)..(18): 2'-deoxy-2'-fluoro
  misc_feature (20)..(21): n stands for thymidine
  misc_feature (20)..(20): Phosphorothioate 3'-Internucleotide Linkage
gaauccucuuccaugcucann

SEQ ID NO: 3233 - RNA, 21 nt, Artificial Sequence
  Description of Artificial Sequence:  siNA antisense region
  misc_feature (1)..(7): 2'-deoxy-2'-fluoro
  misc_feature (12)..(12): 2'-deoxy-2'-fluoro
  misc_feature (18)..(19): 2'-deoxy-2'-fluoro
  misc_feature (20)..(21): n stands for thymidine
  misc_feature (20)..(20): Phosphorothioate 3'-Internucleotide Linkage
cucuucugaggcaagaaccnn

SEQ ID NO: 3234 - RNA, 21 nt, Artificial Sequence
  Description of Artificial Sequence:  siNA antisense region
  misc_feature (1)..(1): 2'-deoxy-2'-fluoro
  misc_feature (3)..(5): 2'-deoxy-2'-fluoro
  misc_feature (8)..(10): 2'-deoxy-2'-fluoro
  misc_feature (14)..(18): 2'-deoxy-2'-fluoro
  misc_feature (20)..(21): n stands for thymidine
  misc_feature (20)..(20): Phosphorothioate 3'-Internucleotide Linkage
ugucugguuugagccuucann

SEQ ID NO: 3235 - RNA, 21 nt, Artificial Sequence
  Description of Artificial Sequence:  siNA sense region
  misc_feature (20)..(21): n stands for thymidine
uccacuuaccugaggagcann

SEQ ID NO: 3236 - RNA, 21 nt, Artificial Sequence
  Description of Artificial Sequence:  siNA sense region
  misc_feature (20)..(21): n stands for thymidine
ugagcauggaagaggauucnn

SEQ ID NO: 3237 - RNA, 21 nt, Artificial Sequence
  Description of Artificial Sequence:  siNA sense region
  misc_feature (20)..(21): n stands for thymidine
gguucuugccucagaagagnn

SEQ ID NO: 3238 - RNA, 21 nt, Artificial Sequence
  Description of Artificial Sequence:  siNA sense region
  misc_feature (20)..(21): n stands for thymidine
ugaaggcucaaaccagacann

SEQ ID NO: 3239 - RNA, 21 nt, Artificial Sequence
  Description of Artificial Sequence:  siNA antisense region
  misc_feature (20)..(21): n stands for thymidine
ugcuccucagguaaguggann

SEQ ID NO: 3240 - RNA, 21 nt, Artificial Sequence
  Description of Artificial Sequence:  siNA antisense region
  misc_feature (20)..(21): n stands for thymidine
gaauccucuuccaugcucann

SEQ ID NO: 3241 - RNA, 21 nt, Artificial Sequence
  Description of Artificial Sequence:  siNA antisense region
  misc_feature (20)..(21): n stands for thymidine
cucuucugaggcaagaaccnn

SEQ ID NO: 3242 - RNA, 21 nt, Artificial Sequence
  Description of Artificial Sequence:  siNA antisense region
  misc_feature (20)..(21): n stands for thymidine
ugucugguuugagccuucann

SEQ ID NO: 3243 - RNA, 21 nt, Artificial Sequence
  Description of Artificial Sequence:  siNA sense region
  misc_feature (20)..(21): n stands for thymidine
accuuggagcaucucaucunn

SEQ ID NO: 3244 - RNA, 21 nt, Artificial Sequence
  Description of Artificial Sequence:  siNA sense region
  misc_feature (20)..(21): n stands for thymidine
accuguuuccuguauggagnn

SEQ ID NO: 3245 - RNA, 21 nt, Artificial Sequence
  Description of Artificial Sequence:  siNA sense region
  misc_feature (20)..(21): n stands for thymidine
caacacagcaggaaucagunn

SEQ ID NO: 3246 - RNA, 21 nt, Artificial Sequence
  Description of Artificial Sequence:  siNA antisense region
  misc_feature (20)..(21): n stands for thymidine
agaugagaugcuccaaggunn

SEQ ID NO: 3247 - RNA, 21 nt, Artificial Sequence
  Description of Artificial Sequence:  siNA antisense region
  misc_feature (20)..(21): n stands for thymidine
cuccauacaggaaacaggunn

SEQ ID NO: 3248 - RNA, 21 nt, Artificial Sequence
  Description of Artificial Sequence:  siNA antisense region
  misc_feature (20)..(21): n stands for thymidine
acugauuccugcuguguugnn

SEQ ID NO: 3249 - RNA, 21 nt, Artificial Sequence
  Description of Artificial Sequence:  siNA sense region
  misc_feature (1)..(1): 2'-deoxy-2'-fluoro
  misc_feature (1)..(1): 5'-3 attached terminal deoxyabasic moeity
  misc_feature (4)..(4): 2'-deoxy-2'-fluoro
  misc_feature (6)..(6): 2'-deoxy-2'-fluoro
  misc_feature (9)..(9): 2'-deoxy-2'-fluoro
  misc_feature (15)..(16): 2'-deoxy-2'-fluoro
  misc_feature (19)..(19): 2'-deoxy-2'-fluoro
  misc_feature (20)..(21): n stands for thymidine
  misc_feature (21)..(21): 3'-3 attached terminal deoxyabasic moeity
caacacagcaggaaucagunn

SEQ ID NO: 3250 - RNA, 21 nt, Artificial Sequence
  Description of Artificial Sequence:  siNA antisense region
  misc_feature (2)..(3): 2'-deoxy-2'-fluoro
  misc_feature (6)..(10): 2'-deoxy-2'-fluoro
  misc_feature (12)..(13): 2'-deoxy-2'-fluoro
  misc_feature (15)..(15): 2'-deoxy-2'-fluoro
  misc_feature (17)..(18): 2'-deoxy-2'-fluoro
  misc_feature (20)..(21): n stands for thymidine
  misc_feature (20)..(20): Phosphorothioate 3'-Internucleotide Linkage
acugauuccugcuguguugnn

SEQ ID NO: 3251 - RNA, 21 nt, Artificial Sequence
  Description of Artificial Sequence:  siNA sense region
  misc_feature (1)..(1): 2'-deoxy-2'-fluoro
  misc_feature (1)..(1): 5'-3 attached terminal deoxyabasic moeity
  misc_feature (2)..(4): 2'-deoxy
  misc_feature (5)..(5): 2'-deoxy-2'-fluoro
  misc_feature (6)..(6): 2'-deoxy
  misc_feature (7)..(7): 2'-deoxy-2'-fluoro
  misc_feature (8)..(16): 2'-deoxy
  misc_feature (17)..(19): 2'-deoxy-2'-fluoro
  misc_feature (20)..(21): n stands for thymidine
  misc_feature (21)..(21): 3'-3 attached terminal deoxyabasic moeity
ugagcauggaagaggauucnn

SEQ ID NO: 3252 - RNA, 21 nt, Artificial Sequence
  Description of Artificial Sequence:  siNA sense region
  misc_feature (1)..(1): 2'-deoxy-2'-fluoro
  misc_feature (1)..(1): 5'-3 attached terminal deoxyabasic moeity
  misc_feature (2)..(3): 2'-deoxy
  misc_feature (4)..(4): 2'-deoxy-2'-fluoro
  misc_feature (5)..(5): 2'-deoxy
  misc_feature (6)..(6): 2'-deoxy-2'-fluoro
  misc_feature (7)..(8): 2'-deoxy
  misc_feature (9)..(9): 2'-deoxy-2'-fluoro
  misc_feature (10)..(14): 2'-deoxy
  misc_feature (15)..(16): 2'-deoxy-2'-fluoro
  misc_feature (17)..(18): 2'-deoxy
  misc_feature (19)..(19): 2'-deoxy-2'-fluoro
  misc_feature (20)..(21): n stands for thymidine
  misc_feature (21)..(21): 3'-3 attached terminal deoxyabasic moeity
caacacagcaggaaucagunn

SEQ ID NO: 3253 - RNA, 21 nt, Artificial Sequence
  Description of Artificial Sequence:  siNA antisense region
  misc_feature (4)..(12): 2'-deoxy-2'-fluoro
  misc_feature (14)..(14): 2'-deoxy-2'-fluoro
  misc_feature (16)..(18): 2'-deoxy-2'-fluoro
  misc_feature (20)..(21): n stands for thymidine
  misc_feature (20)..(20): Phosphorothioate 3'-Internucleotide Linkage
gaauccucuuccaugcucann

SEQ ID NO: 3254 - RNA, 21 nt, Artificial Sequence
  Description of Artificial Sequence:  siNA antisense region
  misc_feature (2)..(3): 2'-deoxy-2'-fluoro
  misc_feature (6)..(10): 2'-deoxy-2'-fluoro
  misc_feature (12)..(13): 2'-deoxy-2'-fluoro
  misc_feature (15)..(15): 2'-deoxy-2'-fluoro
  misc_feature (17)..(18): 2'-deoxy-2'-fluoro
  misc_feature (20)..(20): Phosphorothioate 3'-Internucleotide Linkage
  misc_feature (20)..(21): n stands for thymidine
acugauuccugcuguguugnn

SEQ ID NO: 3255 - RNA, 21 nt, Artificial Sequence
  Description of Artificial Sequence:  siNA sense region
  misc_feature (1)..(1): 5'-3 attached terminal deoxyabasic moeity
  misc_feature (20)..(21): n stands for thymidine
  misc_feature (21)..(21): 3'-3 attached terminal deoxyabasic moeity
ugagcauggaagaggauucnn

SEQ ID NO: 3256 - RNA, 21 nt, Artificial Sequence
  Description of Artificial Sequence:  siNA sense region
  misc_feature (1)..(1): 5'-3 attached terminal deoxyabasic moeity
  misc_feature (21)..(21): 3'-3 attached terminal deoxyabasic moeity
  misc_feature (20)..(21): n stands for thymidine
caacacagcaggaaucagunn

SEQ ID NO: 3257 - RNA, 21 nt, Artificial Sequence
  Description of Artificial Sequence:  siNA antisense region
  misc_feature (20)..(20): Phosphorothioate 3'-Internucleotide Linkage
  misc_feature (20)..(21): n stands for thymidine
gaauccucuuccaugcucann

SEQ ID NO: 3258 - RNA, 21 nt, Artificial Sequence
  Description of Artificial Sequence:  siNA antisense region
  misc_feature (20)..(20): Phosphorothioate 3'-Internucleotide Linkage
  misc_feature (20)..(21): n stands for thymidine
acugauuccugcuguguugnn

SEQ ID NO: 3259 - RNA, 21 nt, Artificial Sequence
  Description of Artificial Sequence:  siNA sense region
  misc_feature (1)..(1): 5'-3 attached terminal deoxyabasic moeity
  misc_feature (1)..(3): 2'-deoxy-2'-fluoro
  misc_feature (13)..(13): 2'-deoxy-2'-fluoro
  misc_feature (15)..(15): 2'-deoxy-2'-fluoro
  misc_feature (19)..(19): 2'-deoxy-2'-fluoro
  misc_feature (20)..(21): n stands for thymidine
  misc_feature (21)..(21): 3'-3 attached terminal deoxyabasic moeity
cuuaggagaagguacgagunn

SEQ ID NO: 3260 - RNA, 21 nt, Artificial Sequence
  Description of Artificial Sequence:  siNA sense region
  misc_feature (1)..(1): 2'-deoxy-2'-fluoro
  misc_feature (1)..(1): 5'-3 attached terminal deoxyabasic moeity
  misc_feature (4)..(5): 2'-deoxy-2'-fluoro
  misc_feature (11)..(11): 2'-deoxy-2'-fluoro
  misc_feature (14)..(14): 2'-deoxy-2'-fluoro
  misc_feature (16)..(16): 2'-deoxy-2'-fluoro
  misc_feature (19)..(19): 2'-deoxy-2'-fluoro
  misc_feature (20)..(21): n stands for thymidine
  misc_feature (21)..(21): 3'-3 attached terminal deoxyabasic moeity
ugacuaaggacgacacaacnn

SEQ ID NO: 3261 - RNA, 21 nt, Artificial Sequence
  Description of Artificial Sequence:  siNA antisense region
  misc_feature (2)..(4): 2'-deoxy-2'-fluoro
  misc_feature (6)..(6): 2'-deoxy-2'-fluoro
  misc_feature (8)..(16): 2'-deoxy-2'-fluoro
  misc_feature (20)..(21): n stands for thymidine
  misc_feature (20)..(20): Phosphorothioate 3'-Internucleotide Linkage
acucguaccuucuccuaagnn

SEQ ID NO: 3262 - RNA, 21 nt, Artificial Sequence
  Description of Artificial Sequence:  siNA antisense region
  misc_feature (2)..(3): 2'-deoxy-2'-fluoro
  misc_feature (5)..(5): 2'-deoxy-2'-fluoro
  misc_feature (7)..(8): 2'-deoxy-2'-fluoro
  misc_feature (10)..(14): 2'-deoxy-2'-fluoro
  misc_feature (17)..(18): 2'-deoxy-2'-fluoro
  misc_feature (20)..(20): Phosphorothioate 3'-Internucleotide Linkage
  misc_feature (20)..(21): n stands for thymidine
guugugucguccuuagucann

SEQ ID NO: 3263 - RNA, 21 nt, Artificial Sequence
  Description of Artificial Sequence:  siNA sense region
  misc_feature (1)..(1): 5'-3 attached terminal deoxyabasic moeity
  misc_feature (1)..(3): 2'-deoxy-2'-fluoro
  misc_feature (13)..(13): 2'-deoxy-2'-fluoro
  misc_feature (15)..(15): 2'-deoxy-2'-fluoro
  misc_feature (19)..(19): 2'-deoxy-2'-fluoro
  misc_feature (20)..(21): n stands for thymidine
  misc_feature (21)..(21): 3'-3 attached terminal deoxyabasic moeity
cuuaggagaagguacgagunn

SEQ ID NO: 3264 - RNA, 21 nt, Artificial Sequence
  Description of Artificial Sequence:  siNA sense region
  misc_feature (1)..(1): 2'-deoxy-2'-fluoro
  misc_feature (1)..(1): 5'-3 attached terminal deoxyabasic moeity
  misc_feature (4)..(5): 2'-deoxy-2'-fluoro
  misc_feature (11)..(11): 2'-deoxy-2'-fluoro
  misc_feature (14)..(14): 2'-deoxy-2'-fluoro
  misc_feature (16)..(16): 2'-deoxy-2'-fluoro
  misc_feature (19)..(19): 2'-deoxy-2'-fluoro
  misc_feature (20)..(21): n stands for thymidine
  misc_feature (21)..(21): 3'-3 attached terminal deoxyabasic moeity
ugacuaaggacgacacaacnn

SEQ ID NO: 3265 - RNA, 21 nt, Artificial Sequence
  Description of Artificial Sequence:  siNA antisense region
  misc_feature (2)..(4): 2'-deoxy-2'-fluoro
  misc_feature (6)..(6): 2'-deoxy-2'-fluoro
  misc_feature (8)..(16): 2'-deoxy-2'-fluoro
  misc_feature (20)..(21): n stands for thymidine
  misc_feature (20)..(20): Phosphorothioate 3'-Internucleotide Linkage
acucguaccuucuccuaagnn

SEQ ID NO: 3266 - RNA, 21 nt, Artificial Sequence
  Description of Artificial Sequence:  siNA antisense region
  misc_feature (2)..(3): 2'-deoxy-2'-fluoro
  misc_feature (5)..(5): 2'-deoxy-2'-fluoro
  misc_feature (7)..(8): 2'-deoxy-2'-fluoro
  misc_feature (10)..(14): 2'-deoxy-2'-fluoro
  misc_feature (17)..(18): 2'-deoxy-2'-fluoro
  misc_feature (20)..(20): Phosphorothioate 3'-Internucleotide Linkage
  misc_feature (20)..(21): n stands for thymidine
guugugucguccuuagucann

SEQ ID NO: 3267 - RNA, 21 nt, Artificial Sequence
  Description of Artificial Sequence:  siNA sense region
  misc_feature (1)..(1): 5'-3 attached terminal deoxyabasic moeity
  misc_feature (21)..(21): 3'-3 attached terminal deoxyabasic moeity
  misc_feature (20)..(21): n stands for thymidine
cuuaggagaagguacgagunn

SEQ ID NO: 3268 - RNA, 21 nt, Artificial Sequence
  Description of Artificial Sequence:  siNA sense region
  misc_feature (1)..(1): 5'-3 attached terminal deoxyabasic moeity
  misc_feature (21)..(21): 3'-3 attached terminal deoxyabasic moeity
  misc_feature (20)..(21): n stands for thymidine
ugacuaaggacgacacaacnn

SEQ ID NO: 3269 - RNA, 21 nt, Artificial Sequence
  Description of Artificial Sequence:  siNA antisense region
  misc_feature (20)..(20): Phosphorothioate 3'-Internucleotide Linkage
  misc_feature (20)..(21): n stands for thymidine
acucguaccuucuccuaagnn

SEQ ID NO: 3270 - RNA, 21 nt, Artificial Sequence
  Description of Artificial Sequence:  siNA antisense region
  misc_feature (20)..(20): Phosphorothioate 3'-Internucleotide Linkage
  misc_feature (20)..(21): n stands for thymidine
guugugucguccuuagucann

SEQ ID NO: 3271 - RNA, 21 nt, Artificial Sequence
  Description of Artificial Sequence:  siNA sense region
  misc_feature (20)..(21): n stands for thymidine
ccuuaugaugccagcaaaunn

SEQ ID NO: 3272 - RNA, 21 nt, Artificial Sequence
  Description of Artificial Sequence:  siNA sense region
  misc_feature (20)..(21): n stands for thymidine
cuuaugaugccagcaaaugnn

SEQ ID NO: 3273 - RNA, 21 nt, Artificial Sequence
  Description of Artificial Sequence:  siNA sense region
  misc_feature (20)..(21): n stands for thymidine
uuaugaugccagcaaauggnn

SEQ ID NO: 3274 - RNA, 21 nt, Artificial Sequence
  Description of Artificial Sequence:  siNA sense region
  misc_feature (20)..(21): n stands for thymidine
uaugaugccagcaaaugggnn

SEQ ID NO: 3275 - RNA, 21 nt, Artificial Sequence
  Description of Artificial Sequence:  siNA sense region
  misc_feature (20)..(21): n stands for thymidine
augaugccagcaaaugggann

SEQ ID NO: 3276 - RNA, 21 nt, Artificial Sequence
  Description of Artificial Sequence:  siNA sense region
  misc_feature (20)..(21): n stands for thymidine
cagaccaugcuggacugcunn

SEQ ID NO: 3277 - RNA, 21 nt, Artificial Sequence
  Description of Artificial Sequence:  siNA sense region
  misc_feature (20)..(21): n stands for thymidine
agaccaugcuggacugcugnn

SEQ ID NO: 3278 - RNA, 21 nt, Artificial Sequence
  Description of Artificial Sequence:  siNA sense region
  misc_feature (20)..(21): n stands for thymidine
gaccaugcuggacugcuggnn

SEQ ID NO: 3279 - RNA, 21 nt, Artificial Sequence
  Description of Artificial Sequence:  siNA sense region
  misc_feature (20)..(21): n stands for thymidine
accaugcuggacugcuggcnn

SEQ ID NO: 3280 - RNA, 21 nt, Artificial Sequence
  Description of Artificial Sequence:  siNA sense region
  misc_feature (20)..(21): n stands for thymidine
ccaugcuggacugcuggcann

SEQ ID NO: 3281 - RNA, 21 nt, Artificial Sequence
  Description of Artificial Sequence:  siNA sense region
  misc_feature (20)..(21): n stands for thymidine
caggauggcaaagacuacann

SEQ ID NO: 3282 - RNA, 21 nt, Artificial Sequence
  Description of Artificial Sequence:  siNA sense region
  misc_feature (20)..(21): n stands for thymidine
aggauggcaaagacuacaunn

SEQ ID NO: 3283 - RNA, 21 nt, Artificial Sequence
  Description of Artificial Sequence:  siNA antisense region
  misc_feature (20)..(21): n stands for thymidine
auuugcuggcaucauaaggnn

SEQ ID NO: 3284 - RNA, 21 nt, Artificial Sequence
  Description of Artificial Sequence:  siNA antisense region
  misc_feature (20)..(21): n stands for thymidine
cauuugcuggcaucauaagnn

SEQ ID NO: 3285 - RNA, 21 nt, Artificial Sequence
  Description of Artificial Sequence:  siNA antisense region
  misc_feature (20)..(21): n stands for thymidine
ccauuugcuggcaucauaann

SEQ ID NO: 3286 - RNA, 21 nt, Artificial Sequence
  Description of Artificial Sequence:  siNA antisense region
  misc_feature (20)..(21): n stands for thymidine
cccauuugcuggcaucauann

SEQ ID NO: 3287 - RNA, 21 nt, Artificial Sequence
  Description of Artificial Sequence:  siNA antisense region
  misc_feature (20)..(21): n stands for thymidine
ucccauuugcuggcaucaunn

SEQ ID NO: 3288 - RNA, 21 nt, Artificial Sequence
  Description of Artificial Sequence:  siNA antisense region
  misc_feature (20)..(21): n stands for thymidine
agcaguccagcauggucugnn

SEQ ID NO: 3289 - RNA, 21 nt, Artificial Sequence
  Description of Artificial Sequence:  siNA antisense region
  misc_feature (20)..(21): n stands for thymidine
cagcaguccagcauggucunn

SEQ ID NO: 3290 - RNA, 21 nt, Artificial Sequence
  Description of Artificial Sequence:  siNA antisense region
  misc_feature (20)..(21): n stands for thymidine
ccagcaguccagcauggucnn

SEQ ID NO: 3291 - RNA, 21 nt, Artificial Sequence
  Description of Artificial Sequence:  siNA antisense region
  misc_feature (20)..(21): n stands for thymidine
gccagcaguccagcauggunn

SEQ ID NO: 3292 - RNA, 21 nt, Artificial Sequence
  Description of Artificial Sequence:  siNA antisense region
  misc_feature (20)..(21): n stands for thymidine
ugccagcaguccagcauggnn

SEQ ID NO: 3293 - RNA, 21 nt, Artificial Sequence
  Description of Artificial Sequence:  siNA antisense region
  misc_feature (20)..(21): n stands for thymidine
uguagucuuugccauccugnn

SEQ ID NO: 3294 - RNA, 21 nt, Artificial Sequence
  Description of Artificial Sequence:  siNA antisense region
  misc_feature (20)..(21): n stands for thymidine
auguagucuuugccauccunn

SEQ ID NO: 3295 - RNA, 21 nt, Artificial Sequence
  Description of Artificial Sequence:  siNA sense region
  misc_feature (1)..(1): 5'-3 attached terminal deoxyabasic moeity
  misc_feature (21)..(21): 3'-3 attached terminal deoxyabasic moeity
  misc_feature (20)..(21): n stands for thymidine
accuuggagcaucucaucunn

SEQ ID NO: 3296 - RNA, 21 nt, Artificial Sequence
  Description of Artificial Sequence:  siNA sense region
  misc_feature (1)..(1): 5'-3 attached terminal deoxyabasic moeity
  misc_feature (21)..(21): 3'-3 attached terminal deoxyabasic moeity
  misc_feature (20)..(21): n stands for thymidine
accuguuuccuguauggagnn

SEQ ID NO: 3297 - RNA, 21 nt, Artificial Sequence
  Description of Artificial Sequence:  siNA antisense region
  misc_feature (20)..(20): Phosphorothioate 3'-Internucleotide Linkage
  misc_feature (20)..(21): n stands for thymidine
agaugagaugcuccaaggunn

SEQ ID NO: 3298 - RNA, 21 nt, Artificial Sequence
  Description of Artificial Sequence:  siNA antisense region
  misc_feature (20)..(20): Phosphorothioate 3'-Internucleotide Linkage
  misc_feature (20)..(21): n stands for thymidine
cuccauacaggaaacaggunn

SEQ ID NO: 3299 - RNA, 21 nt, Artificial Sequence
  Description of Artificial Sequence:  siNA sense region
  misc_feature (1)..(1): 5'-3 attached terminal deoxyabasic moeity
  misc_feature (21)..(21): 3'-3 attached terminal deoxyabasic moeity
  misc_feature (20)..(21): n stands for thymidine
ucuacucuacgagguuccann

SEQ ID NO: 3300 - RNA, 21 nt, Artificial Sequence
  Description of Artificial Sequence:  siNA sense region
  misc_feature (1)..(1): 5'-3 attached terminal deoxyabasic moeity
  misc_feature (21)..(21): 3'-3 attached terminal deoxyabasic moeity
  misc_feature (20)..(21): n stands for thymidine
gagguauguccuuuguccann

SEQ ID NO: 3301 - RNA, 21 nt, Artificial Sequence
  Description of Artificial Sequence:  siNA antisense region
  misc_feature (20)..(20): Phosphorothioate 3'-Internucleotide Linkage
  misc_feature (20)..(21): n stands for thymidine
uggaaccucguagaguagann

SEQ ID NO: 3302 - RNA, 21 nt, Artificial Sequence
  Description of Artificial Sequence:  siNA antisense region
  misc_feature (20)..(20): Phosphorothioate 3'-Internucleotide Linkage
  misc_feature (20)..(21): n stands for thymidine
uggacaaaggacauaccucnn

SEQ ID NO: 3303 - RNA, 21 nt, Artificial Sequence
  Description of Artificial Sequence:  siNA sense region
  misc_feature (1)..(1): 5'-3 attached terminal deoxyabasic moeity
  misc_feature (1)..(1): 2'-deoxy-2'-fluoro
  misc_feature (6)..(11): 2'-deoxy-2'-fluoro
  misc_feature (16)..(16): 2'-deoxy-2'-fluoro
  misc_feature (19)..(19): 2'-deoxy-2'-fluoro
  misc_feature (20)..(21): n stands for thymidine
  misc_feature (21)..(21): 3'-3 attached terminal deoxyabasic moeity
cagaauuuccugggacagcnn

SEQ ID NO: 3304 - RNA, 21 nt, Artificial Sequence
  Description of Artificial Sequence:  siNA sense region
  misc_feature (1)..(1): 5'-3 attached terminal deoxyabasic moeity
  misc_feature (4)..(4): 2'-deoxy-2'-fluoro
  misc_feature (6)..(9): 2'-deoxy-2'-fluoro
  misc_feature (11)..(13): 2'-deoxy-2'-fluoro
  misc_feature (15)..(16): 2'-deoxy-2'-fluoro
  misc_feature (18)..(18): 2'-deoxy-2'-fluoro
  misc_feature (20)..(21): n stands for thymidine
  misc_feature (21)..(21): 3'-3 attached terminal deoxyabasic moeity
gagcaucucaucuguuacann

SEQ ID NO: 3305 - RNA, 21 nt, Artificial Sequence
  Description of Artificial Sequence:  siNA sense region
  misc_feature (1)..(1): 5'-3 attached terminal deoxyabasic moeity
  misc_feature (1)..(1): 2'-deoxy-2'-fluoro
  misc_feature (3)..(7): 2'-deoxy-2'-fluoro
  misc_feature (12)..(13): 2'-deoxy-2'-fluoro
  misc_feature (16)..(16): 2'-deoxy-2'-fluoro
  misc_feature (20)..(21): n stands for thymidine
  misc_feature (21)..(21): 3'-3 attached terminal deoxyabasic moeity
cguuuucagaguugguggann

SEQ ID NO: 3306 - RNA, 21 nt, Artificial Sequence
  Description of Artificial Sequence:  siNA sense region
  misc_feature (1)..(1): 2'-deoxy-2'-fluoro
  misc_feature (1)..(1): 5'-3 attached terminal deoxyabasic moeity
  misc_feature (3)..(5): 2'-deoxy-2'-fluoro
  misc_feature (7)..(12): 2'-deoxy-2'-fluoro
  misc_feature (14)..(14): 2'-deoxy-2'-fluoro
  misc_feature (16)..(16): 2'-deoxy-2'-fluoro
  misc_feature (20)..(21): n stands for thymidine
  misc_feature (21)..(21): 3'-3 attached terminal deoxyabasic moeity
caccuguuuccuguauggann

SEQ ID NO: 3307 - RNA, 21 nt, Artificial Sequence
  Description of Artificial Sequence:  siNA antisense region
  misc_feature (2)..(3): 2'-deoxy-2'-fluoro
  misc_feature (5)..(8): 2'-deoxy-2'-fluoro
  misc_feature (15)..(18): 2'-deoxy-2'-fluoro
  misc_feature (20)..(21): n stands for thymidine
  misc_feature (20)..(20): Phosphorothioate 3'-Internucleotide Linkage
gcugucccaggaaauucugnn

SEQ ID NO: 3308 - RNA, 21 nt, Artificial Sequence
  Description of Artificial Sequence:  siNA antisense region
  misc_feature (1)..(1): 2'-deoxy-2'-fluoro
  misc_feature (3)..(3): 2'-deoxy-2'-fluoro
  misc_feature (6)..(6): 2'-deoxy-2'-fluoro
  misc_feature (10)..(10): 2'-deoxy-2'-fluoro
  misc_feature (15)..(15): 2'-deoxy-2'-fluoro
  misc_feature (17)..(19): 2'-deoxy-2'-fluoro
  misc_feature (20)..(20): Phosphorothioate 3'-Internucleotide Linkage
  misc_feature (20)..(21): n stands for thymidine
uguaacagaugagaugcucnn

SEQ ID NO: 3309 - RNA, 21 nt, Artificial Sequence
  Description of Artificial Sequence:  siNA antisense region
  misc_feature (1)..(3): 2'-deoxy-2'-fluoro
  misc_feature (5)..(6): 2'-deoxy-2'-fluoro
  misc_feature (9)..(12): 2'-deoxy-2'-fluoro
  misc_feature (18)..(18): 2'-deoxy-2'-fluoro
  misc_feature (20)..(21): n stands for thymidine
  misc_feature (20)..(20): Phosphorothioate 3'-Internucleotide Linkage
uccaccaacucugaaaacgnn

SEQ ID NO: 3310 - RNA, 21 nt, Artificial Sequence
  Description of Artificial Sequence:  siNA antisense region
  misc_feature (1)..(3): 2'-deoxy-2'-fluoro
  misc_feature (5)..(5): 2'-deoxy-2'-fluoro
  misc_feature (7)..(7): 2'-deoxy-2'-fluoro
  misc_feature (14)..(14): 2'-deoxy-2'-fluoro
  misc_feature (18)..(18): 2'-deoxy-2'-fluoro
  misc_feature (20)..(20): Phosphorothioate 3'-Internucleotide Linkage
  misc_feature (20)..(21): n stands for thymidine
uccauacaggaaacaggugnn

SEQ ID NO: 3311 - RNA, 21 nt, Artificial Sequence
  Description of Artificial Sequence:  siNA antisense region
  misc_feature (1)..(4): 2'-deoxy-2'-fluoro
  misc_feature (6)..(6): 2'-deoxy-2'-fluoro
  misc_feature (8)..(8): 2'-deoxy-2'-fluoro
  misc_feature (15)..(15): 2'-deoxy-2'-fluoro
  misc_feature (19)..(19): 2'-deoxy-2'-fluoro
  misc_feature (20)..(21): n stands for thymidine
  misc_feature (20)..(20): Phosphorothioate 3'-Internucleotide Linkage
cuccauacaggaaacaggunn

SEQ ID NO: 3312 - RNA, 21 nt, Artificial Sequence
  Description of Artificial Sequence:  siNA sense region
  misc_feature (1)..(1): 2'-deoxy-2'-fluoro
  misc_feature (1)..(1): 5'-3 attached terminal deoxyabasic moeity
  misc_feature (4)..(4): 2'-deoxy-2'-fluoro
  misc_feature (9)..(14): 2'-deoxy-2'-fluoro
  misc_feature (19)..(19): 2'-deoxy-2'-fluoro
  misc_feature (20)..(21): n stands for thymidine
  misc_feature (21)..(21): 3'-3 attached terminal deoxyabasic moeity
cgacaggguccuuuaagacnn

SEQ ID NO: 3313 - RNA, 21 nt, Artificial Sequence
  Description of Artificial Sequence:  siNA sense region
  misc_feature (1)..(1): 5'-3 attached terminal deoxyabasic moeity
  misc_feature (2)..(2): 2'-deoxy-2'-fluoro
  misc_feature (4)..(5): 2'-deoxy-2'-fluoro
  misc_feature (7)..(9): 2'-deoxy-2'-fluoro
  misc_feature (11)..(14): 2'-deoxy-2'-fluoro
  misc_feature (16)..(16): 2'-deoxy-2'-fluoro
  misc_feature (20)..(21): n stands for thymidine
  misc_feature (21)..(21): 3'-3 attached terminal deoxyabasic moeity
acauugucuacucuacgagnn

SEQ ID NO: 3314 - RNA, 21 nt, Artificial Sequence
  Description of Artificial Sequence:  siNA sense region
  misc_feature (1)..(1): 5'-3 attached terminal deoxyabasic moeity
  misc_feature (4)..(4): 2'-deoxy-2'-fluoro
  misc_feature (7)..(8): 2'-deoxy-2'-fluoro
  misc_feature (13)..(17): 2'-deoxy-2'-fluoro
  misc_feature (19)..(19): 2'-deoxy-2'-fluoro
  misc_feature (20)..(21): n stands for thymidine
  misc_feature (21)..(21): 3'-3 attached terminal deoxyabasic moeity
aggugguugagacuuuugcnn

SEQ ID NO: 3315 - RNA, 21 nt, Artificial Sequence
  Description of Artificial Sequence:  siNA sense region
  misc_feature (1)..(1): 5'-3 attached terminal deoxyabasic moeity
  misc_feature (4)..(4): 2'-deoxy-2'-fluoro
  misc_feature (6)..(6): 2'-deoxy-2'-fluoro
  misc_feature (8)..(13): 2'-deoxy-2'-fluoro
  misc_feature (15)..(17): 2'-deoxy-2'-fluoro
  misc_feature (19)..(19): 2'-deoxy-2'-fluoro
  misc_feature (20)..(21): n stands for thymidine
  misc_feature (21)..(21): 3'-3 attached terminal deoxyabasic moeity
agguauguccuuuguccacnn

SEQ ID NO: 3316 - RNA, 21 nt, Artificial Sequence
  Description of Artificial Sequence:  siNA sense region
  misc_feature (1)..(1): 5'-3 attached terminal deoxyabasic moeity
  misc_feature (5)..(5): 2'-deoxy-2'-fluoro
  misc_feature (7)..(7): 2'-deoxy-2'-fluoro
  misc_feature (9)..(14): 2'-deoxy-2'-fluoro
  misc_feature (16)..(18): 2'-deoxy-2'-fluoro
  misc_feature (20)..(21): n stands for thymidine
  misc_feature (21)..(21): 3'-3 attached terminal deoxyabasic moeity
gagguauguccuuuguccann

SEQ ID NO: 3317 - RNA, 21 nt, Artificial Sequence
  Description of Artificial Sequence:  siNA antisense region
  misc_feature (2)..(5): 2'-deoxy-2'-fluoro
  misc_feature (12)..(15): 2'-deoxy-2'-fluoro
  misc_feature (17)..(18): 2'-deoxy-2'-fluoro
  misc_feature (20)..(21): n stands for thymidine
  misc_feature (20)..(20): Phosphorothioate 3'-Internucleotide Linkage
  misc_feature (20)..(20): Phosphorothioate 3'-Internucleotide Linkage
  misc_feature (20)..(21): n stands for thymidine
gucuuaaaggacccugucgnn

SEQ ID NO: 3318 - RNA, 21 nt, Artificial Sequence
  Description of Artificial Sequence:  siNA antisense region
  misc_feature (1)..(3): 2'-deoxy-2'-fluoro
  misc_feature (5)..(5): 2'-deoxy-2'-fluoro
  misc_feature (10)..(10): 2'-deoxy-2'-fluoro
  misc_feature (14)..(14): 2'-deoxy-2'-fluoro
  misc_feature (17)..(17): 2'-deoxy-2'-fluoro
  misc_feature (19)..(19): 2'-deoxy-2'-fluoro
  misc_feature (20)..(21): n stands for thymidine
  misc_feature (20)..(20): Phosphorothioate 3'-Internucleotide Linkage
cucguagaguagacaaugunn

SEQ ID NO: 3319 - RNA, 21 nt, Artificial Sequence
  Description of Artificial Sequence:  siNA antisense region
  misc_feature (2)..(2): 2'-deoxy-2'-fluoro
  misc_feature (8)..(11): 2'-deoxy-2'-fluoro
  misc_feature (14)..(15): 2'-deoxy-2'-fluoro
  misc_feature (17)..(19): 2'-deoxy-2'-fluoro
  misc_feature (20)..(20): Phosphorothioate 3'-Internucleotide Linkage
  misc_feature (20)..(21): n stands for thymidine
gcaaaagucucaaccaccunn

SEQ ID NO: 3320 - RNA, 21 nt, Artificial Sequence
  Description of Artificial Sequence:  siNA antisense region
  misc_feature (2)..(2): 2'-deoxy-2'-fluoro
  misc_feature (6)..(6): 2'-deoxy-2'-fluoro
  misc_feature (13)..(13): 2'-deoxy-2'-fluoro
  misc_feature (15)..(15): 2'-deoxy-2'-fluoro
  misc_feature (17)..(19): 2'-deoxy-2'-fluoro
  misc_feature (20)..(21): n stands for thymidine
  misc_feature (20)..(20): Phosphorothioate 3'-Internucleotide Linkage
guggacaaaggacauaccunn

SEQ ID NO: 3321 - RNA, 21 nt, Artificial Sequence
  Description of Artificial Sequence:  siNA antisense region
  misc_feature (1)..(1): 2'-deoxy-2'-fluoro
  misc_feature (5)..(5): 2'-deoxy-2'-fluoro
  misc_feature (12)..(12): 2'-deoxy-2'-fluoro
  misc_feature (14)..(14): 2'-deoxy-2'-fluoro
  misc_feature (16)..(19): 2'-deoxy-2'-fluoro
  misc_feature (20)..(20): Phosphorothioate 3'-Internucleotide Linkage
  misc_feature (20)..(21): n stands for thymidine
uggacaaaggacauaccucnn

SEQ ID NO: 3322 - RNA, 21 nt, Artificial Sequence
  Description of Artificial Sequence:  siNA sense region
  misc_feature (1)..(1): 5'-3 attached terminal deoxyabasic moeity
  misc_feature (21)..(21): 3'-3 attached terminal deoxyabasic moeity
  misc_feature (20)..(21): n stands for thymidine
cagaauuuccugggacagcnn

SEQ ID NO: 3323 - RNA, 21 nt, Artificial Sequence
  Description of Artificial Sequence:  siNA sense region
  misc_feature (1)..(1): 5'-3 attached terminal deoxyabasic moeity
  misc_feature (21)..(21): 3'-3 attached terminal deoxyabasic moeity
  misc_feature (20)..(21): n stands for thymidine
gagcaucucaucuguuacann

SEQ ID NO: 3324 - RNA, 21 nt, Artificial Sequence
  Description of Artificial Sequence:  siNA sense region
  misc_feature (1)..(1): 5'-3 attached terminal deoxyabasic moeity
  misc_feature (21)..(21): 3'-3 attached terminal deoxyabasic moeity
  misc_feature (20)..(21): n stands for thymidine
cguuuucagaguugguggann

SEQ ID NO: 3325 - RNA, 21 nt, Artificial Sequence
  Description of Artificial Sequence:  siNA sense region
  misc_feature (1)..(1): 5'-3 attached terminal deoxyabasic moeity
  misc_feature (21)..(21): 3'-3 attached terminal deoxyabasic moeity
  misc_feature (20)..(21): n stands for thymidine
caccuguuuccuguauggann

SEQ ID NO: 3326 - RNA, 21 nt, Artificial Sequence
  Description of Artificial Sequence:  siNA antisense region
  misc_feature (20)..(20): Phosphorothioate 3'-Internucleotide Linkage
  misc_feature (20)..(21): n stands for thymidine
gcugucccaggaaauucugnn

SEQ ID NO: 3327 - RNA, 21 nt, Artificial Sequence
  Description of Artificial Sequence:  siNA antisense region
  misc_feature (20)..(20): Phosphorothioate 3'-Internucleotide Linkage
  misc_feature (20)..(21): n stands for thymidine
uguaacagaugagaugcucnn

SEQ ID NO: 3328 - RNA, 21 nt, Artificial Sequence
  Description of Artificial Sequence:  siNA antisense region
  misc_feature (20)..(20): Phosphorothioate 3'-Internucleotide Linkage
  misc_feature (20)..(21): n stands for thymidine
uccaccaacucugaaaacgnn

SEQ ID NO: 3329 - RNA, 21 nt, Artificial Sequence
  Description of Artificial Sequence:  siNA antisense region
  misc_feature (20)..(20): Phosphorothioate 3'-Internucleotide Linkage
  misc_feature (20)..(21): n stands for thymidine
uccauacaggaaacaggugnn

SEQ ID NO: 3330 - RNA, 21 nt, Artificial Sequence
  Description of Artificial Sequence:  siNA sense region
  misc_feature (1)..(1): 5'-3 attached terminal deoxyabasic moeity
  misc_feature (21)..(21): 3'-3 attached terminal deoxyabasic moeity
  misc_feature (20)..(21): n stands for thymidine
cgacaggguccuuuaagacnn

SEQ ID NO: 3331 - RNA, 21 nt, Artificial Sequence
  Description of Artificial Sequence:  siNA sense region
  misc_feature (1)..(1): 5'-3 attached terminal deoxyabasic moeity
  misc_feature (21)..(21): 3'-3 attached terminal deoxyabasic moeity
  misc_feature (20)..(21): n stands for thymidine
acauugucuacucuacgagnn

SEQ ID NO: 3332 - RNA, 21 nt, Artificial Sequence
  Description of Artificial Sequence:  siNA sense region
  misc_feature (1)..(1): 5'-3 attached terminal deoxyabasic moeity
  misc_feature (21)..(21): 3'-3 attached terminal deoxyabasic moeity
  misc_feature (20)..(21): n stands for thymidine
aggugguugagacuuuugcnn

SEQ ID NO: 3333 - RNA, 21 nt, Artificial Sequence
  Description of Artificial Sequence:  siNA sense region
  misc_feature (1)..(1): 5'-3 attached terminal deoxyabasic moeity
  misc_feature (21)..(21): 3'-3 attached terminal deoxyabasic moeity
  misc_feature (20)..(21): n stands for thymidine
agguauguccuuuguccacnn

SEQ ID NO: 3334 - RNA, 21 nt, Artificial Sequence
  Description of Artificial Sequence:  siNA antisense region
  misc_feature (20)..(20): Phosphorothioate 3'-Internucleotide Linkage
  misc_feature (20)..(21): n stands for thymidine
gucuuaaaggacccugucgnn

SEQ ID NO: 3335 - RNA, 21 nt, Artificial Sequence
  Description of Artificial Sequence:  siNA antisense region
  misc_feature (20)..(20): Phosphorothioate 3'-Internucleotide Linkage
  misc_feature (20)..(21): n stands for thymidine
cucguagaguagacaaugunn

SEQ ID NO: 3336 - RNA, 21 nt, Artificial Sequence
  Description of Artificial Sequence:  siNA antisense region
  misc_feature (20)..(20): Phosphorothioate 3'-Internucleotide Linkage
  misc_feature (20)..(21): n stands for thymidine
gcaaaagucucaaccaccunn

SEQ ID NO: 3337 - RNA, 21 nt, Artificial Sequence
  Description of Artificial Sequence:  siNA antisense region
  misc_feature (20)..(20): Phosphorothioate 3'-Internucleotide Linkage
  misc_feature (20)..(21): n stands for thymidine
guggacaaaggacauaccunn

SEQ ID NO: 3338 - RNA, 21 nt, Artificial Sequence
  Description of Artificial Sequence:  siNA sense region
  misc_feature (1)..(1): 5'-3 attached terminal deoxyabasic moeity
  misc_feature (1)..(1): 2'-deoxy-2'-fluoro
  misc_feature (2)..(2): 2'-deoxy
  misc_feature (3)..(3): 2'-deoxy-2'-fluoro
  misc_feature (4)..(5): 2'-deoxy
  misc_feature (6)..(6): 2'-deoxy-2'-fluoro
  misc_feature (7)..(7): 2'-deoxy
  misc_feature (8)..(9): 2'-deoxy-2'-fluoro
  misc_feature (10)..(11): 2'-deoxy
  misc_feature (12)..(12): 2'-deoxy-2'-fluoro
  misc_feature (13)..(15): 2'-deoxy
  misc_feature (16)..(16): 2'-deoxy-2'-fluoro
  misc_feature (17)..(19): 2'-deoxy
  misc_feature (20)..(21): n stands for thymidine
  misc_feature (21)..(21): 3'-3 attached terminal deoxyabasic moeity
uaugaugccagcaaaugggnn

SEQ ID NO: 3339 - RNA, 21 nt, Artificial Sequence
  Description of Artificial Sequence:  siNA sense region
  misc_feature (1)..(1): 5'-3 attached terminal deoxyabasic moeity
  misc_feature (1)..(1): 2'-deoxy
  misc_feature (2)..(2): 2'-deoxy-2'-fluoro
  misc_feature (3)..(4): 2'-deoxy
  misc_feature (5)..(5): 2'-deoxy-2'-fluoro
  misc_feature (6)..(6): 2'-deoxy
  misc_feature (7)..(8): 2'-deoxy-2'-fluoro
  misc_feature (9)..(10): 2'-deoxy
  misc_feature (11)..(11): 2'-deoxy-2'-fluoro
  misc_feature (12)..(14): 2'-deoxy
  misc_feature (15)..(15): 2'-deoxy-2'-fluoro
  misc_feature (16)..(19): 2'-deoxy
  misc_feature (20)..(21): n stands for thymidine
  misc_feature (21)..(21): 5'-3 attached terminal deoxyabasic moeity
augaugccagcaaaugggann

SEQ ID NO: 3340 - RNA, 21 nt, Artificial Sequence
  Description of Artificial Sequence:  siNA sense region
  misc_feature (1)..(1): 5'-3 attached terminal deoxyabasic moeity
  misc_feature (1)..(1): 2'-deoxy
  misc_feature (2)..(3): 2'-deoxy-2'-fluoro
  misc_feature (4)..(4): 2'-deoxy
  misc_feature (5)..(5): 2'-deoxy-2'-fluoro
  misc_feature (6)..(6): 2'-deoxy
  misc_feature (7)..(8): 2'-deoxy-2'-fluoro
  misc_feature (9)..(11): 2'-deoxy
  misc_feature (12)..(13): 2'-deoxy-2'-fluoro
  misc_feature (14)..(14): 2'-deoxy
  misc_feature (15)..(16): 2'-deoxy-2'-fluoro
  misc_feature (17)..(18): 2'-deoxy
  misc_feature (19)..(19): 2'-deoxy-2'-fluoro
  misc_feature (20)..(21): n stands for thymidine
  misc_feature (21)..(21): 3'-3 attached terminal deoxyabasic moeity
accaugcuggacugcuggcnn

SEQ ID NO: 3341 - RNA, 21 nt, Artificial Sequence
  Description of Artificial Sequence:  siNA sense region
  misc_feature (1)..(1): 5'-3 attached terminal deoxyabasic moeity
  misc_feature (1)..(2): 2'-deoxy-2'-fluoro
  misc_feature (3)..(3): 2'-deoxy
  misc_feature (4)..(4): 2'-deoxy-2'-fluoro
  misc_feature (5)..(5): 2'-deoxy
  misc_feature (6)..(7): 2'-deoxy-2'-fluoro
  misc_feature (8)..(10): 2'-deoxy
  misc_feature (11)..(12): 2'-deoxy-2'-fluoro
  misc_feature (13)..(13): 2'-deoxy
  misc_feature (14)..(15): 2'-deoxy-2'-fluoro
  misc_feature (16)..(17): 2'-deoxy
  misc_feature (18)..(18): 2'-deoxy-2'-fluoro
  misc_feature (19)..(19): 2'-deoxy
  misc_feature (20)..(21): n stands for thymidine
  misc_feature (21)..(21): 3'-3 attached terminal deoxyabasic moeity
ccaugcuggacugcuggcann

SEQ ID NO: 3342 - RNA, 21 nt, Artificial Sequence
  Description of Artificial Sequence:  siNA antisense region
  misc_feature (1)..(3): 2'-deoxy-2'-fluoro
  misc_feature (4)..(4): 2'-O-methyl
  misc_feature (5)..(7): 2'-deoxy-2'-fluoro
  misc_feature (8)..(8): 2'-O-methyl
  misc_feature (9)..(10): 2'-deoxy-2'-fluoro
  misc_feature (11)..(12): 2'-O-methyl
  misc_feature (13)..(13): 2'-deoxy-2'-fluoro
  misc_feature (14)..(14): 2'-O-methyl
  misc_feature (15)..(16): 2'-deoxy-2'-fluoro
  misc_feature (17)..(17): 2'-O-methyl
  misc_feature (18)..(18): 2'-deoxy-2'-fluoro
  misc_feature (19)..(19): 2'-O-methyl
  misc_feature (20)..(21): n stands for thymidine
  misc_feature (20)..(20): Phosphorothioate 3'-Internucleotide Linkage
cccauuugcuggcaucauann

SEQ ID NO: 3343 - RNA, 21 nt, Artificial Sequence
  Description of Artificial Sequence:  siNA antisense region
  misc_feature (1)..(4): 2'-deoxy-2'-fluoro
  misc_feature (5)..(5): 2'-O-methyl
  misc_feature (6)..(8): 2'-deoxy-2'-fluoro
  misc_feature (9)..(9): 2'-O-methyl
  misc_feature (10)..(11): 2'-deoxy-2'-fluoro
  misc_feature (12)..(13): 2'-O-methyl
  misc_feature (14)..(14): 2'-deoxy-2'-fluoro
  misc_feature (15)..(15): 2'-O-methyl
  misc_feature (16)..(17): 2'-deoxy-2'-fluoro
  misc_feature (18)..(18): 2'-O-methyl
  misc_feature (19)..(19): 2'-deoxy-2'-fluoro
  misc_feature (20)..(21): n stands for thymidine
  misc_feature (20)..(20): Phosphorothioate 3'-Internucleotide Linkage
ucccauuugcuggcaucaunn

SEQ ID NO: 3344 - RNA, 21 nt, Artificial Sequence
  Description of Artificial Sequence:  siNA antisense region
  misc_feature (1)..(1): 2'-O-methyl
  misc_feature (2)..(3): 2'-deoxy-2'-fluoro
  misc_feature (4)..(5): 2'-O-methyl
  misc_feature (6)..(6): 2'-deoxy-2'-fluoro
  misc_feature (7)..(8): 2'-O-methyl
  misc_feature (9)..(11): 2'-deoxy-2'-fluoro
  misc_feature (12)..(13): 2'-O-methyl
  misc_feature (14)..(14): 2'-deoxy-2'-fluoro
  misc_feature (15)..(15): 2'-O-methyl
  misc_feature (16)..(16): 2'-deoxy-2'-fluoro
  misc_feature (17)..(18): 2'-O-methyl
  misc_feature (19)..(19): 2'-deoxy-2'-fluoro
  misc_feature (20)..(21): n stands for thymidine
  misc_feature (20)..(20): Phosphorothioate 3'-Internucleotide Linkage
gccagcaguccagcauggunn

SEQ ID NO: 3345 - RNA, 21 nt, Artificial Sequence
  Description of Artificial Sequence:  siNA antisense region
  misc_feature (1)..(1): 2'-deoxy-2'-fluoro
  misc_feature (2)..(2): 2'-O-methyl
  misc_feature (3)..(4): 2'-deoxy-2'-fluoro
  misc_feature (5)..(6): 2'-O-methyl
  misc_feature (7)..(7): 2'-deoxy-2'-fluoro
  misc_feature (8)..(9): 2'-O-methyl
  misc_feature (10)..(12): 2'-deoxy-2'-fluoro
  misc_feature (13)..(14): 2'-O-methyl
  misc_feature (15)..(15): 2'-deoxy-2'-fluoro
  misc_feature (16)..(16): 2'-O-methyl
  misc_feature (17)..(17): 2'-deoxy-2'-fluoro
  misc_feature (18)..(19): 2'-O-methyl
  misc_feature (20)..(21): n stands for thymidine
  misc_feature (20)..(20): Phosphorothioate 3'-Internucleotide Linkage
ugccagcaguccagcauggnn

SEQ ID NO: 3346 - RNA, 21 nt, Artificial Sequence
  Description of Artificial Sequence:  siNA sense region
  misc_feature (1)..(1): 5'-3 attached terminal deoxyabasic moeity
  misc_feature (21)..(21): 3'-3 attached terminal deoxyabasic moeity
  misc_feature (20)..(21): n stands for thymidine
uaugaugccagcaaaugggnn

SEQ ID NO: 3347 - RNA, 21 nt, Artificial Sequence
  Description of Artificial Sequence:  siNA sense region
  misc_feature (1)..(1): 5'-3 attached terminal deoxyabasic moeity
  misc_feature (21)..(21): 3'-3 attached terminal deoxyabasic moeity
  misc_feature (20)..(21): n stands for thymidine
augaugccagcaaaugggann

SEQ ID NO: 3348 - RNA, 21 nt, Artificial Sequence
  Description of Artificial Sequence:  siNA sense region
  misc_feature (1)..(1): 5'-3 attached terminal deoxyabasic moeity
  misc_feature (21)..(21): 3'-3 attached terminal deoxyabasic moeity
  misc_feature (20)..(21): n stands for thymidine
accaugcuggacugcuggcnn

SEQ ID NO: 3349 - RNA, 21 nt, Artificial Sequence
  Description of Artificial Sequence:  siNA sense region
  misc_feature (1)..(1): 5'-3 attached terminal deoxyabasic moeity
  misc_feature (21)..(21): 3'-3 attached terminal deoxyabasic moeity
  misc_feature (20)..(21): n stands for thymidine
ccaugcuggacugcuggcann

SEQ ID NO: 3350 - RNA, 21 nt, Artificial Sequence
  Description of Artificial Sequence:  siNA antisense region
  misc_feature (20)..(20): Phosphorothioate 3'-Internucleotide Linkage
  misc_feature (20)..(21): n stands for thymidine
cccauuugcuggcaucauann

SEQ ID NO: 3351 - RNA, 21 nt, Artificial Sequence
  Description of Artificial Sequence:  siNA antisense region
  misc_feature (20)..(20): Phosphorothioate 3'-Internucleotide Linkage
  misc_feature (20)..(21): n stands for thymidine
ucccauuugcuggcaucaunn

SEQ ID NO: 3352 - RNA, 21 nt, Artificial Sequence
  Description of Artificial Sequence:  siNA antisense region
  misc_feature (20)..(20): Phosphorothioate 3'-Internucleotide Linkage
  misc_feature (20)..(21): n stands for thymidine
gccagcaguccagcauggunn

SEQ ID NO: 3353 - RNA, 21 nt, Artificial Sequence
  Description of Artificial Sequence:  siNA antisense region
  misc_feature (20)..(20): Phosphorothioate 3'-Internucleotide Linkage
  misc_feature (20)..(21): n stands for thymidine
ugccagcaguccagcauggnn

SEQ ID NO: 3354 - RNA, 21 nt, Artificial Sequence
  Description of Artificial Sequence:  siNA sense region
  misc_feature (1)..(1): 5'-3 attached terminal deoxyabasic moeity
  misc_feature (1)..(3): 2'-deoxy
  misc_feature (4)..(4): 2'-deoxy-2'-fluoro
  misc_feature (5)..(7): 2'-deoxy
  misc_feature (8)..(8): 2'-deoxy-2'-fluoro
  misc_feature (9)..(10): 2'-deoxy
  misc_feature (11)..(12): 2'-deoxy-2'-fluoro
  misc_feature (13)..(13): 2'-deoxy
  misc_feature (14)..(14): 2'-deoxy-2'-fluoro
  misc_feature (15)..(16): 2'-deoxy
  misc_feature (17)..(17): 2'-deoxy-2'-fluoro
  misc_feature (18)..(18): 2'-deoxy
  misc_feature (19)..(19): 2'-deoxy-2'-fluoro
  misc_feature (20)..(21): n stands for thymidine
  misc_feature (21)..(21): 3'-3 attached terminal deoxyabasic moeity
ggguaaacgaccguaguaunn

SEQ ID NO: 3355 - RNA, 21 nt, Artificial Sequence
  Description of Artificial Sequence:  siNA sense region
  misc_feature (1)..(1): 5'-3 attached terminal deoxyabasic moeity
  misc_feature (1)..(4): 2'-deoxy
  misc_feature (5)..(5): 2'-deoxy-2'-fluoro
  misc_feature (6)..(8): 2'-deoxy
  misc_feature (9)..(9): 2'-deoxy-2'-fluoro
  misc_feature (10)..(11): 2'-deoxy
  misc_feature (12)..(13): 2'-deoxy-2'-fluoro
  misc_feature (14)..(14): 2'-deoxy
  misc_feature (15)..(15): 2'-deoxy-2'-fluoro
  misc_feature (16)..(17): 2'-deoxy
  misc_feature (18)..(18): 2'-deoxy-2'-fluoro
  misc_feature (19)..(19): 2'-deoxy
  misc_feature (20)..(21): n stands for thymidine
  misc_feature (21)..(21): 3'-3 attached terminal deoxyabasic moeity
aggguaaacgaccguaguann

SEQ ID NO: 3356 - RNA, 21 nt, Artificial Sequence
  Description of Artificial Sequence:  siNA sense region
  misc_feature (1)..(1): 5'-3 attached terminal deoxyabasic moeity
  misc_feature (1)..(1): 2'-deoxy-2'-fluoro
  misc_feature (2)..(3): 2'-deoxy
  misc_feature (4)..(5): 2'-deoxy-2'-fluoro
  misc_feature (6)..(6): 2'-deoxy
  misc_feature (7)..(8): 2'-deoxy-2'-fluoro
  misc_feature (9)..(11): 2'-deoxy
  misc_feature (12)..(13): 2'-deoxy-2'-fluoro
  misc_feature (14)..(14): 2'-deoxy
  misc_feature (15)..(15): 2'-deoxy-2'-fluoro
  misc_feature (16)..(16): 2'-deoxy
  misc_feature (17)..(18): 2'-deoxy-2'-fluoro
  misc_feature (20)..(21): n stands for thymidine
  misc_feature (21)..(21): 3'-3 attached terminal deoxyabasic moeity
cggucgucaggucguaccann

SEQ ID NO: 3357 - RNA, 21 nt, Artificial Sequence
  Description of Artificial Sequence:  siNA sense region
  misc_feature (1)..(1): 5'-3 attached terminal deoxyabasic moeity
  misc_feature (1)..(1): 2'-deoxy
  misc_feature (2)..(2): 2'-deoxy-2'-fluoro
  misc_feature (3)..(4): 2'-deoxy
  misc_feature (5)..(6): 2'-deoxy-2'-fluoro
  misc_feature (7)..(7): 2'-deoxy
  misc_feature (8)..(9): 2'-deoxy-2'-fluoro
  misc_feature (10)..(12): 2'-deoxy
  misc_feature (13)..(14): 2'-deoxy-2'-fluoro
  misc_feature (15)..(15): 2'-deoxy
  misc_feature (16)..(16): 2'-deoxy-2'-fluoro
  misc_feature (17)..(17): 2'-deoxy
  misc_feature (18)..(19): 2'-deoxy-2'-fluoro
  misc_feature (20)..(21): n stands for thymidine
  misc_feature (21)..(21): 3'-3 attached terminal deoxyabasic moeity
acggucgucaggucguaccnn

SEQ ID NO: 3358 - RNA, 21 nt, Artificial Sequence
  Description of Artificial Sequence:  siNA antisense region
  misc_feature (1)..(1): 2'-O-methyl
  misc_feature (2)..(2): 2'-deoxy-2'-fluoro
  misc_feature (3)..(3): 2'-O-methyl
  misc_feature (4)..(5): 2'-deoxy-2'-fluoro
  misc_feature (6)..(6): 2'-O-methyl
  misc_feature (7)..(7): 2'-deoxy-2'-fluoro
  misc_feature (8)..(9): 2'-O-methyl
  misc_feature (10)..(11): 2'-deoxy-2'-fluoro
  misc_feature (12)..(12): 2'-O-methyl
  misc_feature (13)..(15): 2'-deoxy-2'-fluoro
  misc_feature (16)..(16): 2'-O-methyl
  misc_feature (17)..(19): 2'-deoxy-2'-fluoro
  misc_feature (20)..(21): n stands for thymidine
  misc_feature (20)..(20): Phosphorothioate 3'-Internucleotide Linkage
auacuacggucguuuacccnn

SEQ ID NO: 3359 - RNA, 21 nt, Artificial Sequence
  Description of Artificial Sequence:  siNA antisense region
  misc_feature (1)..(1): 2'-deoxy-2'-fluoro
  misc_feature (2)..(2): 2'-O-methyl
  misc_feature (3)..(4): 2'-deoxy-2'-fluoro
  misc_feature (5)..(5): 2'-O-methyl
  misc_feature (6)..(6): 2'-deoxy-2'-fluoro
  misc_feature (7)..(8): 2'-O-methyl
  misc_feature (9)..(10): 2'-deoxy-2'-fluoro
  misc_feature (11)..(11): 2'-O-methyl
  misc_feature (12)..(14): 2'-deoxy-2'-fluoro
  misc_feature (15)..(15): 2'-O-methyl
  misc_feature (16)..(19): 2'-deoxy-2'-fluoro
  misc_feature (20)..(21): n stands for thymidine
  misc_feature (20)..(20): Phosphorothioate 3'-Internucleotide Linkage
uacuacggucguuuacccunn

SEQ ID NO: 3360 - RNA, 21 nt, Artificial Sequence
  Description of Artificial Sequence:  siNA antisense region
  misc_feature (1)..(1): 2'-deoxy-2'-fluoro
  misc_feature (2)..(3): 2'-O-methyl
  misc_feature (4)..(4): 2'-deoxy-2'-fluoro
  misc_feature (5)..(5): 2'-O-methyl
  misc_feature (6)..(6): 2'-deoxy-2'-fluoro
  misc_feature (7)..(8): 2'-O-methyl
  misc_feature (9)..(11): 2'-deoxy-2'-fluoro
  misc_feature (12)..(13): 2'-O-methyl
  misc_feature (14)..(14): 2'-deoxy-2'-fluoro
  misc_feature (15)..(16): 2'-O-methyl
  misc_feature (17)..(18): 2'-deoxy-2'-fluoro
  misc_feature (19)..(19): 2'-O-methyl
  misc_feature (20)..(21): n stands for thymidine
  misc_feature (20)..(20): Phosphorothioate 3'-Internucleotide Linkage
ugguacgaccugacgaccgnn

SEQ ID NO: 3361 - RNA, 21 nt, Artificial Sequence
  Description of Artificial Sequence:  siNA antisense region
  misc_feature (1)..(2): 2'-O-methyl
  misc_feature (3)..(3): 2'-deoxy-2'-fluoro
  misc_feature (4)..(4): 2'-O-methyl
  misc_feature (5)..(5): 2'-deoxy-2'-fluoro
  misc_feature (6)..(7): 2'-O-methyl
  misc_feature (8)..(10): 2'-deoxy-2'-fluoro
  misc_feature (11)..(12): 2'-O-methyl
  misc_feature (13)..(13): 2'-deoxy-2'-fluoro
  misc_feature (14)..(15): 2'-O-methyl
  misc_feature (16)..(17): 2'-deoxy-2'-fluoro
  misc_feature (18)..(18): 2'-O-methyl
  misc_feature (19)..(19): 2'-deoxy-2'-fluoro
  misc_feature (20)..(21): n stands for thymidine
  misc_feature (20)..(20): Phosphorothioate 3'-Internucleotide Linkage
gguacgaccugacgaccgunn

SEQ ID NO: 3362 - RNA, 21 nt, Artificial Sequence
  Description of Artificial Sequence:  siNA sense region
  misc_feature (1)..(1): 5'-3 attached terminal deoxyabasic moeity
  misc_feature (21)..(21): 3'-3 attached terminal deoxyabasic moeity
  misc_feature (20)..(21): n stands for thymidine
ggguaaacgaccguaguaunn

SEQ ID NO: 3363 - RNA, 21 nt, Artificial Sequence
  Description of Artificial Sequence:  siNA sense region
  misc_feature (1)..(1): 5'-3 attached terminal deoxyabasic moeity
  misc_feature (21)..(21): 3'-3 attached terminal deoxyabasic moeity
  misc_feature (20)..(21): n stands for thymidine
aggguaaacgaccguaguann

SEQ ID NO: 3364 - RNA, 21 nt, Artificial Sequence
  Description of Artificial Sequence:  siNA sense region
  misc_feature (1)..(1): 5'-3 attached terminal deoxyabasic moeity
  misc_feature (21)..(21): 3'-3 attached terminal deoxyabasic moeity
  misc_feature (20)..(21): n stands for thymidine
cggucgucaggucguaccann

SEQ ID NO: 3365 - RNA, 21 nt, Artificial Sequence
  Description of Artificial Sequence:  siNA sense region
  misc_feature (1)..(1): 5'-3 attached terminal deoxyabasic moeity
  misc_feature (21)..(21): 3'-3 attached terminal deoxyabasic moeity
  misc_feature (20)..(21): n stands for thymidine
acggucgucaggucguaccnn

SEQ ID NO: 3366 - RNA, 21 nt, Artificial Sequence
  Description of Artificial Sequence:  siNA antisense region
  misc_feature (20)..(20): Phosphorothioate 3'-Internucleotide Linkage
  misc_feature (20)..(21): n stands for thymidine
auacuacggucguuuacccnn

SEQ ID NO: 3367 - RNA, 21 nt, Artificial Sequence
  Description of Artificial Sequence:  siNA antisense region
  misc_feature (20)..(20): Phosphorothioate 3'-Internucleotide Linkage
  misc_feature (20)..(21): n stands for thymidine
uacuacggucguuuacccunn

SEQ ID NO: 3368 - RNA, 21 nt, Artificial Sequence
  Description of Artificial Sequence:  siNA antisense region
  misc_feature (20)..(20): Phosphorothioate 3'-Internucleotide Linkage
  misc_feature (20)..(21): n stands for thymidine
ugguacgaccugacgaccgnn

SEQ ID NO: 3369 - RNA, 21 nt, Artificial Sequence
  Description of Artificial Sequence:  siNA antisense region
  misc_feature (20)..(20): Phosphorothioate 3'-Internucleotide Linkage
  misc_feature (20)..(21): n stands for thymidine
gguacgaccugacgaccgunn

SEQ ID NO: 3370 - RNA, 21 nt, Artificial Sequence
  Description of Artificial Sequence:  siNA antisense region
  misc_feature (1)..(1): 2'-O-methyl
  misc_feature (2)..(3): 2'-deoxy-2'-fluoro
  misc_feature (4)..(5): 2'-O-methyl
  misc_feature (6)..(6): 2'-deoxy-2'-fluoro
  misc_feature (7)..(8): 2'-O-methyl
  misc_feature (9)..(11): 2'-deoxy-2'-fluoro
  misc_feature (12)..(13): 2'-O-methyl
  misc_feature (14)..(14): 2'-deoxy-2'-fluoro
  misc_feature (15)..(15): 2'-O-methyl
  misc_feature (16)..(16): 2'-deoxy-2'-fluoro
  misc_feature (17)..(18): 2'-O-methyl
  misc_feature (19)..(19): 2'-deoxy-2'-fluoro
  misc_feature (20)..(20): n stands for thymidine
  misc_feature (21)..(21): 3'-3 attached terminal deoxyabasic moeity
gccagcaguccagcauggunn

SEQ ID NO: 3371 - RNA, 19 nt, Artificial Sequence
  Description of Artificial Sequence:  siNA antisense region
  misc_feature (1)..(1): 2'-O-methyl
  misc_feature (2)..(3): 2'-deoxy-2'-fluoro
  misc_feature (4)..(5): 2'-O-methyl
  misc_feature (6)..(6): 2'-deoxy-2'-fluoro
  misc_feature (7)..(8): 2'-O-methyl
  misc_feature (9)..(11): 2'-deoxy-2'-fluoro
  misc_feature (12)..(13): 2'-O-methyl
  misc_feature (14)..(14): 2'-deoxy-2'-fluoro
  misc_feature (15)..(15): 2'-O-methyl
  misc_feature (16)..(16): 2'-deoxy-2'-fluoro
  misc_feature (17)..(18): 2'-O-methyl
gccagcaguccagcauggu

SEQ ID NO: 3372 - RNA, 21 nt, Artificial Sequence
  Description of Artificial Sequence:  siNA antisense region
  misc_feature (1)..(1): 2'-deoxy-2'-fluoro
  misc_feature (2)..(3): 2'-O-methyl
  misc_feature (4)..(4): 2'-deoxy-2'-fluoro
  misc_feature (5)..(5): 2'-O-methyl
  misc_feature (6)..(6): 2'-deoxy-2'-fluoro
  misc_feature (7)..(8): 2'-O-methyl
  misc_feature (9)..(11): 2'-deoxy-2'-fluoro
  misc_feature (12)..(13): 2'-O-methyl
  misc_feature (14)..(14): 2'-deoxy-2'-fluoro
  misc_feature (15)..(16): 2'-O-methyl
  misc_feature (17)..(18): 2'-deoxy-2'-fluoro
  misc_feature (19)..(19): 2'-O-methyl
  misc_feature (20)..(20): n stands for thymidine
  misc_feature (21)..(21): 3'-3 attached terminal deoxyabasic moeity
ugguacgaccugacgaccgnn

SEQ ID NO: 3373 - RNA, 19 nt, Artificial Sequence
  Description of Artificial Sequence:  siNA antisense region
  misc_feature (1)..(1): 2'-deoxy-2'-fluoro
  misc_feature (2)..(3): 2'-O-methyl
  misc_feature (4)..(4): 2'-deoxy-2'-fluoro
  misc_feature (5)..(5): 2'-O-methyl
  misc_feature (6)..(6): 2'-deoxy-2'-fluoro
  misc_feature (7)..(8): 2'-O-methyl
  misc_feature (9)..(11): 2'-deoxy-2'-fluoro
  misc_feature (12)..(13): 2'-O-methyl
  misc_feature (14)..(14): 2'-deoxy-2'-fluoro
  misc_feature (15)..(16): 2'-O-methyl
  misc_feature (17)..(18): 2'-deoxy-2'-fluoro
  misc_feature (19)..(19): 2'-O-methyl
ugguacgaccugacgaccg

SEQ ID NO: 3374 - RNA, 21 nt, Artificial Sequence
  Description of Artificial Sequence:  siNA sense region
  misc_feature (20)..(21): n stands for thymidine
agaguggcagugagcaaagnn

SEQ ID NO: 3375 - RNA, 21 nt, Artificial Sequence
  Description of Artificial Sequence:  siNA sense region
  misc_feature (20)..(21): n stands for thymidine
cuuugcucacugccacucunn

SEQ ID NO: 3376 - RNA, 21 nt, Artificial Sequence
  Description of Artificial Sequence:  siNA sense region
  misc_feature (1)..(1): 5'-3 attached terminal deoxyabasic moeity
  misc_feature (2)..(3): 2'-deoxy-2'-fluoro
  misc_feature (5)..(5): 2'-deoxy-2'-fluoro
  misc_feature (7)..(8): 2'-deoxy-2'-fluoro
  misc_feature (12)..(13): 2'-deoxy-2'-fluoro
  misc_feature (15)..(16): 2'-deoxy-2'-fluoro
  misc_feature (19)..(19): 2'-deoxy-2'-fluoro
  misc_feature (20)..(20): n stands for thymidine
  misc_feature (21)..(21): 3'-3 attached terminal deoxyabasic moeity
accaugcuggacugcuggcnn

SEQ ID NO: 3377 - RNA, 21 nt, Artificial Sequence
  Description of Artificial Sequence:  siNA sense region
  misc_feature (1)..(1): 5'-3 attached terminal deoxyabasic moeity
  misc_feature (1)..(1): 2'-deoxy
  misc_feature (2)..(3): 2'-deoxy-2'-fluoro
  misc_feature (4)..(4): 2'-deoxy
  misc_feature (5)..(5): 2'-deoxy-2'-fluoro
  misc_feature (6)..(6): 2'-deoxy
  misc_feature (7)..(8): 2'-deoxy-2'-fluoro
  misc_feature (9)..(11): 2'-deoxy
  misc_feature (12)..(13): 2'-deoxy-2'-fluoro
  misc_feature (14)..(15): 2'-deoxy
  misc_feature (17)..(19): 2'-deoxy
  misc_feature (20)..(20): n stands for thymidine
  misc_feature (21)..(21): 3'-3 attached terminal deoxyabasic moeity
accaugcuggacugcuggcnn

SEQ ID NO: 3378 - RNA, 21 nt, Artificial Sequence
  Description of Artificial Sequence:  siNA antisense region
  misc_feature (1)..(1): 2'-O-methyl
  misc_feature (4)..(5): 2'-O-methyl
  misc_feature (7)..(8): 2'-O-methyl
  misc_feature (9)..(11): 2'-deoxy-2'-fluoro
  misc_feature (12)..(13): 2'-O-methyl
  misc_feature (14)..(14): 2'-deoxy-2'-fluoro
  misc_feature (15)..(15): 2'-O-methyl
  misc_feature (16)..(16): 2'-deoxy-2'-fluoro
  misc_feature (17)..(18): 2'-O-methyl
  misc_feature (19)..(19): 2'-deoxy-2'-fluoro
  misc_feature (20)..(20): Phosphorothioate 3'-Internucleotide Linkage
  misc_feature (21)..(21): n stands for thymidine
gccagcaguccagcauggunn

SEQ ID NO: 3379 - RNA, 21 nt, Artificial Sequence
  Description of Artificial Sequence:  siNA antisense region
  misc_feature (6)..(6): 2'-deoxy-2'-fluoro
  misc_feature (9)..(11): 2'-deoxy-2'-fluoro
  misc_feature (14)..(14): 2'-deoxy-2'-fluoro
  misc_feature (16)..(16): 2'-deoxy-2'-fluoro
  misc_feature (19)..(19): 2'-deoxy-2'-fluoro
  misc_feature (20)..(20): Phosphorothioate 3'-Internucleotide Linkage
  misc_feature (21)..(21): n stands for thymidine
gccagcaguccagcauggunn

SEQ ID NO: 3380 - RNA, 21 nt, Artificial Sequence
  Description of Artificial Sequence:  siNA antisense region
  misc_feature (1)..(1): 2'-O-methyl
  misc_feature (4)..(5): 2'-O-methyl
  misc_feature (6)..(6): 2'-deoxy-2'-fluoro
  misc_feature (7)..(8): 2'-O-methyl
  misc_feature (9)..(11): 2'-deoxy-2'-fluoro
  misc_feature (12)..(13): 2'-O-methyl
  misc_feature (14)..(14): 2'-deoxy-2'-fluoro
  misc_feature (15)..(15): 2'-O-methyl
  misc_feature (16)..(16): 2'-deoxy-2'-fluoro
  misc_feature (17)..(18): 2'-O-methyl
  misc_feature (19)..(19): 2'-deoxy-2'-fluoro
  misc_feature (20)..(20): Phosphorothioate 3'-Internucleotide Linkage
  misc_feature (21)..(21): n stands for thymidine
gccagcaguccagcauggunn

SEQ ID NO: 3381 - RNA, 21 nt, Artificial Sequence
  Description of Artificial Sequence:  siNA antisense region
  misc_feature (1)..(1): 2'-O-methyl
  misc_feature (4)..(5): 2'-O-methyl
  misc_feature (6)..(6): 2'-deoxy-2'-fluoro
  misc_feature (7)..(8): 2'-O-methyl
  misc_feature (9)..(11): 2'-deoxy-2'-fluoro
  misc_feature (12)..(13): 2'-O-methyl
  misc_feature (14)..(14): 2'-deoxy-2'-fluoro
  misc_feature (15)..(15): 2'-O-methyl
  misc_feature (16)..(16): 2'-deoxy-2'-fluoro
  misc_feature (17)..(18): 2'-O-methyl
  misc_feature (19)..(19): 2'-deoxy-2'-fluoro
  misc_feature (20)..(20): Phosphorothioate 3'-Internucleotide Linkage
  misc_feature (21)..(21): n stands for thymidine
gccagcaguccagcauggunn

SEQ ID NO: 3382 - RNA, 21 nt, Artificial Sequence
  Description of Artificial Sequence:  siNA antisense region
  misc_feature (1)..(1): 2'-O-methyl
  misc_feature (3)..(3): 2'-deoxy-2'-fluoro
  misc_feature (4)..(5): 2'-O-methyl
  misc_feature (6)..(6): 2'-deoxy-2'-fluoro
  misc_feature (7)..(8): 2'-O-methyl
  misc_feature (9)..(11): 2'-deoxy-2'-fluoro
  misc_feature (12)..(13): 2'-O-methyl
  misc_feature (14)..(14): 2'-deoxy-2'-fluoro
  misc_feature (15)..(15): 2'-O-methyl
  misc_feature (16)..(16): 2'-deoxy-2'-fluoro
  misc_feature (17)..(18): 2'-O-methyl
  misc_feature (19)..(19): 2'-deoxy-2'-fluoro
  misc_feature (20)..(20): Phosphorothioate 3'-Internucleotide Linkage
  misc_feature (21)..(21): n stands for thymidine
gccagcaguccagcauggunn

SEQ ID NO: 3383 - RNA, 21 nt, Artificial Sequence
  Description of Artificial Sequence:  siNA antisense region
  misc_feature (2)..(3): 2'-O-methyl
  misc_feature (2)..(3): 2'-deoxy-2'-fluoro
  misc_feature (6)..(6): 2'-O-methyl
  misc_feature (6)..(6): 2'-deoxy-2'-fluoro
  misc_feature (9)..(11): 2'-O-methyl
  misc_feature (9)..(11): 2'-deoxy-2'-fluoro
  misc_feature (14)..(14): 2'-O-methyl
  misc_feature (14)..(14): 2'-deoxy-2'-fluoro
  misc_feature (16)..(16): 2'-O-methyl
  misc_feature (16)..(16): 2'-deoxy-2'-fluoro
  misc_feature (19)..(19): 2'-O-methyl
  misc_feature (19)..(19): 2'-deoxy-2'-fluoro
  misc_feature (20)..(20): Phosphorothioate 3'-Internucleotide Linkage
  misc_feature (21)..(21): n stands for thymidine
gccagcaguccagcauggunn

SEQ ID NO: 3384 - RNA, 21 nt, Artificial Sequence
  Description of Artificial Sequence:  siNA sense region
  misc_feature (20)..(21): n stands for thymidine
gcagaaaguccgucuggcann

SEQ ID NO: 3385 - RNA, 21 nt, Artificial Sequence
  Description of Artificial Sequence:  siNA sense region
  misc_feature (20)..(21): n stands for thymidine
cagaaaguccgucuggcagnn

SEQ ID NO: 3386 - RNA, 21 nt, Artificial Sequence
  Description of Artificial Sequence:  siNA sense region
  misc_feature (20)..(21): n stands for thymidine
agaaaguccgucuggcagcnn

SEQ ID NO: 3387 - RNA, 21 nt, Artificial Sequence
  Description of Artificial Sequence:  siNA sense region
  misc_feature (20)..(21): n stands for thymidine
gcagccuggauauccucucnn

SEQ ID NO: 3388 - RNA, 21 nt, Artificial Sequence
  Description of Artificial Sequence:  siNA sense region
  misc_feature (20)..(21): n stands for thymidine
cagccuggauauccucuccnn

SEQ ID NO: 3389 - RNA, 21 nt, Artificial Sequence
  Description of Artificial Sequence:  siNA sense region
  misc_feature (20)..(21): n stands for thymidine
cgggcucccuagcccugugnn

SEQ ID NO: 3390 - RNA, 21 nt, Artificial Sequence
  Description of Artificial Sequence:  siNA sense region
  misc_feature (20)..(21): n stands for thymidine
gggcucccuagcccugugcnn

SEQ ID NO: 3391 - RNA, 21 nt, Artificial Sequence
  Description of Artificial Sequence:  siNA sense region
  misc_feature (20)..(21): n stands for thymidine
uccuucucuagacaggcgcnn

SEQ ID NO: 3392 - RNA, 21 nt, Artificial Sequence
  Description of Artificial Sequence:  siNA sense region
  misc_feature (20)..(21): n stands for thymidine
ccuucucuagacaggcgcunn

SEQ ID NO: 3393 - RNA, 21 nt, Artificial Sequence
  Description of Artificial Sequence:  siNA sense region
  misc_feature (20)..(21): n stands for thymidine
cuucucuagacaggcgcugnn

SEQ ID NO: 3394 - RNA, 21 nt, Artificial Sequence
  Description of Artificial Sequence:  siNA sense region
  misc_feature (20)..(21): n stands for thymidine
gguggaggugacugagugcnn

SEQ ID NO: 3395 - RNA, 21 nt, Artificial Sequence
  Description of Artificial Sequence:  siNA sense region
  misc_feature (20)..(21): n stands for thymidine
guggaggugacugagugcann

SEQ ID NO: 3396 - RNA, 21 nt, Artificial Sequence
  Description of Artificial Sequence:  siNA sense region
  misc_feature (20)..(21): n stands for thymidine
uggcauggucuucugugaann

SEQ ID NO: 3397 - RNA, 21 nt, Artificial Sequence
  Description of Artificial Sequence:  siNA sense region
  misc_feature (20)..(21): n stands for thymidine
ggcauggucuucugugaagnn

SEQ ID NO: 3398 - RNA, 21 nt, Artificial Sequence
  Description of Artificial Sequence:  siNA sense region
  misc_feature (20)..(21): n stands for thymidine
aagcaaaaauuaaugaugann

SEQ ID NO: 3399 - RNA, 21 nt, Artificial Sequence
  Description of Artificial Sequence:  siNA sense region
  misc_feature (20)..(21): n stands for thymidine
agcaaaaauuaaugaugaann

SEQ ID NO: 3400 - RNA, 21 nt, Artificial Sequence
  Description of Artificial Sequence:  siNA sense region
  misc_feature (20)..(21): n stands for thymidine
aagaagaacagcacauuugnn

SEQ ID NO: 3401 - RNA, 21 nt, Artificial Sequence
  Description of Artificial Sequence:  siNA sense region
  misc_feature (20)..(21): n stands for thymidine
cacauuugucaggguccaunn

SEQ ID NO: 3402 - RNA, 21 nt, Artificial Sequence
  Description of Artificial Sequence:  siNA sense region
  misc_feature (20)..(21): n stands for thymidine
uggcauggaaucucuggugnn

SEQ ID NO: 3403 - RNA, 21 nt, Artificial Sequence
  Description of Artificial Sequence:  siNA sense region
  misc_feature (20)..(21): n stands for thymidine
ucucugguggaagccacggnn

SEQ ID NO: 3404 - RNA, 21 nt, Artificial Sequence
  Description of Artificial Sequence:  siNA sense region
  misc_feature (20)..(21): n stands for thymidine
ucucucugguuguguaugunn

SEQ ID NO: 3405 - RNA, 21 nt, Artificial Sequence
  Description of Artificial Sequence:  siNA sense region
  misc_feature (20)..(21): n stands for thymidine
cucucugguuguguaugucnn

SEQ ID NO: 3406 - RNA, 21 nt, Artificial Sequence
  Description of Artificial Sequence:  siNA sense region
  misc_feature (20)..(21): n stands for thymidine
aucucuccuguggauuccunn

SEQ ID NO: 3407 - RNA, 21 nt, Artificial Sequence
  Description of Artificial Sequence:  siNA sense region
  misc_feature (20)..(21): n stands for thymidine
ucucuccuguggauuccuann

SEQ ID NO: 3408 - RNA, 21 nt, Artificial Sequence
  Description of Artificial Sequence:  siNA sense region
  misc_feature (20)..(21): n stands for thymidine
gucagcuuuguacaaaugunn

SEQ ID NO: 3409 - RNA, 21 nt, Artificial Sequence
  Description of Artificial Sequence:  siNA sense region
  misc_feature (20)..(21): n stands for thymidine
caagacagcaacuugcaggnn

SEQ ID NO: 3410 - RNA, 21 nt, Artificial Sequence
  Description of Artificial Sequence:  siNA sense region
  misc_feature (20)..(21): n stands for thymidine
aagacagcaacuugcaggann

SEQ ID NO: 3411 - RNA, 21 nt, Artificial Sequence
  Description of Artificial Sequence:  siNA sense region
  misc_feature (20)..(21): n stands for thymidine
agacagcaacuugcaggacnn

SEQ ID NO: 3412 - RNA, 21 nt, Artificial Sequence
  Description of Artificial Sequence:  siNA sense region
  misc_feature (20)..(21): n stands for thymidine
cauggugauuguggaauucnn

SEQ ID NO: 3413 - RNA, 21 nt, Artificial Sequence
  Description of Artificial Sequence:  siNA sense region
  misc_feature (20)..(21): n stands for thymidine
auggugauuguggaauucunn

SEQ ID NO: 3414 - RNA, 21 nt, Artificial Sequence
  Description of Artificial Sequence:  siNA sense region
  misc_feature (20)..(21): n stands for thymidine
ccucagugauguagaagaann

SEQ ID NO: 3415 - RNA, 21 nt, Artificial Sequence
  Description of Artificial Sequence:  siNA sense region
  misc_feature (20)..(21): n stands for thymidine
aagaagaggaagcuccugann

SEQ ID NO: 3416 - RNA, 21 nt, Artificial Sequence
  Description of Artificial Sequence:  siNA sense region
  misc_feature (20)..(21): n stands for thymidine
agaagaggaagcuccugaann

SEQ ID NO: 3417 - RNA, 21 nt, Artificial Sequence
  Description of Artificial Sequence:  siNA sense region
  misc_feature (20)..(21): n stands for thymidine
aggaagcuccugaagaucunn

SEQ ID NO: 3418 - RNA, 21 nt, Artificial Sequence
  Description of Artificial Sequence:  siNA sense region
  misc_feature (20)..(21): n stands for thymidine
ggaagcuccugaagaucugnn

SEQ ID NO: 3419 - RNA, 21 nt, Artificial Sequence
  Description of Artificial Sequence:  siNA sense region
  misc_feature (20)..(21): n stands for thymidine
ggcauggaguucuuggcaunn

SEQ ID NO: 3420 - RNA, 21 nt, Artificial Sequence
  Description of Artificial Sequence:  siNA sense region
  misc_feature (20)..(21): n stands for thymidine
gcugugggaaauauuuuccnn

SEQ ID NO: 3421 - RNA, 21 nt, Artificial Sequence
  Description of Artificial Sequence:  siNA sense region
  misc_feature (20)..(21): n stands for thymidine
cugugggaaauauuuuccunn

SEQ ID NO: 3422 - RNA, 21 nt, Artificial Sequence
  Description of Artificial Sequence:  siNA sense region
  misc_feature (20)..(21): n stands for thymidine
uggaagaggauucuggacunn

SEQ ID NO: 3423 - RNA, 21 nt, Artificial Sequence
  Description of Artificial Sequence:  siNA sense region
  misc_feature (20)..(21): n stands for thymidine
cucucucugccuaccucacnn

SEQ ID NO: 3424 - RNA, 21 nt, Artificial Sequence
  Description of Artificial Sequence:  siNA sense region
  misc_feature (20)..(21): n stands for thymidine
ucucucugccuaccucaccnn

SEQ ID NO: 3425 - RNA, 21 nt, Artificial Sequence
  Description of Artificial Sequence:  siNA sense region
  misc_feature (20)..(21): n stands for thymidine
gcugauagagauuggagugnn

SEQ ID NO: 3426 - RNA, 21 nt, Artificial Sequence
  Description of Artificial Sequence:  siNA sense region
  misc_feature (20)..(21): n stands for thymidine
cugauagagauuggagugcnn

SEQ ID NO: 3427 - RNA, 21 nt, Artificial Sequence
  Description of Artificial Sequence:  siNA sense region
  misc_feature (20)..(21): n stands for thymidine
acagcccagauucuccagcnn

SEQ ID NO: 3428 - RNA, 21 nt, Artificial Sequence
  Description of Artificial Sequence:  siNA sense region
  misc_feature (20)..(21): n stands for thymidine
cagcccagauucuccagccnn

SEQ ID NO: 3429 - RNA, 21 nt, Artificial Sequence
  Description of Artificial Sequence:  siNA sense region
  misc_feature (20)..(21): n stands for thymidine
agcccagauucuccagccunn

SEQ ID NO: 3430 - RNA, 21 nt, Artificial Sequence
  Description of Artificial Sequence:  siNA sense region
  misc_feature (20)..(21): n stands for thymidine
gcccagauucuccagccugnn

SEQ ID NO: 3431 - RNA, 21 nt, Artificial Sequence
  Description of Artificial Sequence:  siNA sense region
  misc_feature (20)..(21): n stands for thymidine
cucuccuccuguuuaaaagnn

SEQ ID NO: 3432 - RNA, 21 nt, Artificial Sequence
  Description of Artificial Sequence:  siNA sense region
  misc_feature (20)..(21): n stands for thymidine
uccuggaagaggcuugugann

SEQ ID NO: 3433 - RNA, 21 nt, Artificial Sequence
  Description of Artificial Sequence:  siNA sense region
  misc_feature (20)..(21): n stands for thymidine
ccuggaagaggcuugugacnn

SEQ ID NO: 3434 - RNA, 21 nt, Artificial Sequence
  Description of Artificial Sequence:  siNA sense region
  misc_feature (20)..(21): n stands for thymidine
cuggaagaggcuugugaccnn

SEQ ID NO: 3435 - RNA, 21 nt, Artificial Sequence
  Description of Artificial Sequence:  siNA sense region
  misc_feature (20)..(21): n stands for thymidine
gaagaggcuugugacccaann

SEQ ID NO: 3436 - RNA, 21 nt, Artificial Sequence
  Description of Artificial Sequence:  siNA sense region
  misc_feature (20)..(21): n stands for thymidine
uugaagaugggaaggauuunn

SEQ ID NO: 3437 - RNA, 21 nt, Artificial Sequence
  Description of Artificial Sequence:  siNA sense region
  misc_feature (20)..(21): n stands for thymidine
ugguggaggugggcaugggnn

SEQ ID NO: 3438 - RNA, 21 nt, Artificial Sequence
  Description of Artificial Sequence:  siNA sense region
  misc_feature (20)..(21): n stands for thymidine
guugugcuguuucugacucnn

SEQ ID NO: 3439 - RNA, 21 nt, Artificial Sequence
  Description of Artificial Sequence:  siNA sense region
  misc_feature (20)..(21): n stands for thymidine
uugugcuguuucugacuccnn

SEQ ID NO: 3440 - RNA, 21 nt, Artificial Sequence
  Description of Artificial Sequence:  siNA sense region
  misc_feature (20)..(21): n stands for thymidine
ugugcuguuucugacuccunn

SEQ ID NO: 3441 - RNA, 21 nt, Artificial Sequence
  Description of Artificial Sequence:  siNA sense region
  misc_feature (20)..(21): n stands for thymidine
aaaguuucaggaaggauuunn

SEQ ID NO: 3442 - RNA, 21 nt, Artificial Sequence
  Description of Artificial Sequence:  siNA sense region
  misc_feature (20)..(21): n stands for thymidine
aaguuucaggaaggauuuunn

SEQ ID NO: 3443 - RNA, 21 nt, Artificial Sequence
  Description of Artificial Sequence:  siNA sense region
  misc_feature (20)..(21): n stands for thymidine
aguuucaggaaggauuuuann

SEQ ID NO: 3444 - RNA, 21 nt, Artificial Sequence
  Description of Artificial Sequence:  siNA sense region
  misc_feature (20)..(21): n stands for thymidine
aaaaaagaaaauguguuuunn

SEQ ID NO: 3445 - RNA, 21 nt, Artificial Sequence
  Description of Artificial Sequence:  siNA sense region
  misc_feature (20)..(21): n stands for thymidine
auucacauuuuguaucagunn

SEQ ID NO: 3446 - RNA, 21 nt, Artificial Sequence
  Description of Artificial Sequence:  siNA sense region
  misc_feature (20)..(21): n stands for thymidine
uucacauuuuguaucaguann

SEQ ID NO: 3447 - RNA, 21 nt, Artificial Sequence
  Description of Artificial Sequence:  siNA sense region
  misc_feature (20)..(21): n stands for thymidine
ucacauuuuguaucaguaunn

SEQ ID NO: 3448 - RNA, 21 nt, Artificial Sequence
  Description of Artificial Sequence:  siNA antisense region
  misc_feature (20)..(21): n stands for thymidine
ugccagacggacuuucugcnn

SEQ ID NO: 3449 - RNA, 21 nt, Artificial Sequence
  Description of Artificial Sequence:  siNA antisense region
  misc_feature (20)..(21): n stands for thymidine
cugccagacggacuuucugnn

SEQ ID NO: 3450 - RNA, 21 nt, Artificial Sequence
  Description of Artificial Sequence:  siNA antisense region
  misc_feature (20)..(21): n stands for thymidine
gcugccagacggacuuucunn

SEQ ID NO: 3451 - RNA, 21 nt, Artificial Sequence
  Description of Artificial Sequence:  siNA antisense region
  misc_feature (20)..(21): n stands for thymidine
gagaggauauccaggcugcnn

SEQ ID NO: 3452 - RNA, 21 nt, Artificial Sequence
  Description of Artificial Sequence:  siNA antisense region
  misc_feature (20)..(21): n stands for thymidine
ggagaggauauccaggcugnn

SEQ ID NO: 3453 - RNA, 21 nt, Artificial Sequence
  Description of Artificial Sequence:  siNA antisense region
  misc_feature (20)..(21): n stands for thymidine
cacagggcuagggagcccgnn

SEQ ID NO: 3454 - RNA, 21 nt, Artificial Sequence
  Description of Artificial Sequence:  siNA antisense region
  misc_feature (20)..(21): n stands for thymidine
gcacagggcuagggagcccnn

SEQ ID NO: 3455 - RNA, 21 nt, Artificial Sequence
  Description of Artificial Sequence:  siNA antisense region
  misc_feature (20)..(21): n stands for thymidine
gcgccugucuagagaaggann

SEQ ID NO: 3456 - RNA, 21 nt, Artificial Sequence
  Description of Artificial Sequence:  siNA antisense region
  misc_feature (20)..(21): n stands for thymidine
agcgccugucuagagaaggnn

SEQ ID NO: 3457 - RNA, 21 nt, Artificial Sequence
  Description of Artificial Sequence:  siNA antisense region
  misc_feature (20)..(21): n stands for thymidine
cagcgccugucuagagaagnn

SEQ ID NO: 3458 - RNA, 21 nt, Artificial Sequence
  Description of Artificial Sequence:  siNA antisense region
  misc_feature (20)..(21): n stands for thymidine
gcacucagucaccuccaccnn

SEQ ID NO: 3459 - RNA, 21 nt, Artificial Sequence
  Description of Artificial Sequence:  siNA antisense region
  misc_feature (20)..(21): n stands for thymidine
ugcacucagucaccuccacnn

SEQ ID NO: 3460 - RNA, 21 nt, Artificial Sequence
  Description of Artificial Sequence:  siNA antisense region
  misc_feature (20)..(21): n stands for thymidine
uucacagaagaccaugccann

SEQ ID NO: 3461 - RNA, 21 nt, Artificial Sequence
  Description of Artificial Sequence:  siNA antisense region
  misc_feature (20)..(21): n stands for thymidine
cuucacagaagaccaugccnn

SEQ ID NO: 3462 - RNA, 21 nt, Artificial Sequence
  Description of Artificial Sequence:  siNA antisense region
  misc_feature (20)..(21): n stands for thymidine
ucaucauuaauuuuugcuunn

SEQ ID NO: 3463 - RNA, 21 nt, Artificial Sequence
  Description of Artificial Sequence:  siNA antisense region
  misc_feature (20)..(21): n stands for thymidine
uucaucauuaauuuuugcunn

SEQ ID NO: 3464 - RNA, 21 nt, Artificial Sequence
  Description of Artificial Sequence:  siNA antisense region
  misc_feature (20)..(21): n stands for thymidine
caaaugugcuguucuucuunn

SEQ ID NO: 3465 - RNA, 21 nt, Artificial Sequence
  Description of Artificial Sequence:  siNA antisense region
  misc_feature (20)..(21): n stands for thymidine
auggacccugacaaaugugnn

SEQ ID NO: 3466 - RNA, 21 nt, Artificial Sequence
  Description of Artificial Sequence:  siNA antisense region
  misc_feature (20)..(21): n stands for thymidine
caccagagauuccaugccann

SEQ ID NO: 3467 - RNA, 21 nt, Artificial Sequence
  Description of Artificial Sequence:  siNA antisense region
  misc_feature (20)..(21): n stands for thymidine
ccguggcuuccaccagagann

SEQ ID NO: 3468 - RNA, 21 nt, Artificial Sequence
  Description of Artificial Sequence:  siNA antisense region
  misc_feature (20)..(21): n stands for thymidine
acauacacaaccagagagann

SEQ ID NO: 3469 - RNA, 21 nt, Artificial Sequence
  Description of Artificial Sequence:  siNA antisense region
  misc_feature (20)..(21): n stands for thymidine
gacauacacaaccagagagnn

SEQ ID NO: 3470 - RNA, 21 nt, Artificial Sequence
  Description of Artificial Sequence:  siNA antisense region
  misc_feature (20)..(21): n stands for thymidine
aggaauccacaggagagaunn

SEQ ID NO: 3471 - RNA, 21 nt, Artificial Sequence
  Description of Artificial Sequence:  siNA antisense region
  misc_feature (20)..(21): n stands for thymidine
uaggaauccacaggagagann

SEQ ID NO: 3472 - RNA, 21 nt, Artificial Sequence
  Description of Artificial Sequence:  siNA antisense region
  misc_feature (20)..(21): n stands for thymidine
acauuuguacaaagcugacnn

SEQ ID NO: 3473 - RNA, 21 nt, Artificial Sequence
  Description of Artificial Sequence:  siNA antisense region
  misc_feature (20)..(21): n stands for thymidine
ccugcaaguugcugucuugnn

SEQ ID NO: 3474 - RNA, 21 nt, Artificial Sequence
  Description of Artificial Sequence:  siNA antisense region
  misc_feature (20)..(21): n stands for thymidine
uccugcaaguugcugucuunn

SEQ ID NO: 3475 - RNA, 21 nt, Artificial Sequence
  Description of Artificial Sequence:  siNA antisense region
  misc_feature (20)..(21): n stands for thymidine
guccugcaaguugcugucunn

SEQ ID NO: 3476 - RNA, 21 nt, Artificial Sequence
  Description of Artificial Sequence:  siNA antisense region
  misc_feature (20)..(21): n stands for thymidine
gaauuccacaaucaccaugnn

SEQ ID NO: 3477 - RNA, 21 nt, Artificial Sequence
  Description of Artificial Sequence:  siNA antisense region
  misc_feature (20)..(21): n stands for thymidine
agaauuccacaaucaccaunn

SEQ ID NO: 3478 - RNA, 21 nt, Artificial Sequence
  Description of Artificial Sequence:  siNA antisense region
  misc_feature (20)..(21): n stands for thymidine
uucuucuacaucacugaggnn

SEQ ID NO: 3479 - RNA, 21 nt, Artificial Sequence
  Description of Artificial Sequence:  siNA antisense region
  misc_feature (20)..(21): n stands for thymidine
ucaggagcuuccucuucuunn

SEQ ID NO: 3480 - RNA, 21 nt, Artificial Sequence
  Description of Artificial Sequence:  siNA antisense region
  misc_feature (20)..(21): n stands for thymidine
uucaggagcuuccucuucunn

SEQ ID NO: 3481 - RNA, 21 nt, Artificial Sequence
  Description of Artificial Sequence:  siNA antisense region
  misc_feature (20)..(21): n stands for thymidine
agaucuucaggagcuuccunn

SEQ ID NO: 3482 - RNA, 21 nt, Artificial Sequence
  Description of Artificial Sequence:  siNA antisense region
  misc_feature (20)..(21): n stands for thymidine
cagaucuucaggagcuuccnn

SEQ ID NO: 3483 - RNA, 21 nt, Artificial Sequence
  Description of Artificial Sequence:  siNA antisense region
  misc_feature (20)..(21): n stands for thymidine
augccaagaacuccaugccnn

SEQ ID NO: 3484 - RNA, 21 nt, Artificial Sequence
  Description of Artificial Sequence:  siNA antisense region
  misc_feature (20)..(21): n stands for thymidine
ggaaaauauuucccacagcnn

SEQ ID NO: 3485 - RNA, 21 nt, Artificial Sequence
  Description of Artificial Sequence:  siNA antisense region
  misc_feature (20)..(21): n stands for thymidine
aggaaaauauuucccacagnn

SEQ ID NO: 3486 - RNA, 21 nt, Artificial Sequence
  Description of Artificial Sequence:  siNA antisense region
  misc_feature (20)..(21): n stands for thymidine
aguccagaauccucuuccann

SEQ ID NO: 3487 - RNA, 21 nt, Artificial Sequence
  Description of Artificial Sequence:  siNA antisense region
  misc_feature (20)..(21): n stands for thymidine
gugagguaggcagagagagnn

SEQ ID NO: 3488 - RNA, 21 nt, Artificial Sequence
  Description of Artificial Sequence:  siNA antisense region
  misc_feature (20)..(21): n stands for thymidine
ggugagguaggcagagagann

SEQ ID NO: 3489 - RNA, 21 nt, Artificial Sequence
  Description of Artificial Sequence:  siNA antisense region
  misc_feature (20)..(21): n stands for thymidine
cacuccaaucucuaucagcnn

SEQ ID NO: 3490 - RNA, 21 nt, Artificial Sequence
  Description of Artificial Sequence:  siNA antisense region
  misc_feature (20)..(21): n stands for thymidine
gcacuccaaucucuaucagnn

SEQ ID NO: 3491 - RNA, 21 nt, Artificial Sequence
  Description of Artificial Sequence:  siNA antisense region
  misc_feature (20)..(21): n stands for thymidine
gcuggagaaucugggcugunn

SEQ ID NO: 3492 - RNA, 21 nt, Artificial Sequence
  Description of Artificial Sequence:  siNA antisense region
  misc_feature (20)..(21): n stands for thymidine
ggcuggagaaucugggcugnn

SEQ ID NO: 3493 - RNA, 21 nt, Artificial Sequence
  Description of Artificial Sequence:  siNA antisense region
  misc_feature (20)..(21): n stands for thymidine
aggcuggagaaucugggcunn

SEQ ID NO: 3494 - RNA, 21 nt, Artificial Sequence
  Description of Artificial Sequence:  siNA antisense region
  misc_feature (20)..(21): n stands for thymidine
caggcuggagaaucugggcnn

SEQ ID NO: 3495 - RNA, 21 nt, Artificial Sequence
  Description of Artificial Sequence:  siNA antisense region
  misc_feature (20)..(21): n stands for thymidine
cuuuuaaacaggaggagagnn

SEQ ID NO: 3496 - RNA, 21 nt, Artificial Sequence
  Description of Artificial Sequence:  siNA antisense region
  misc_feature (20)..(21): n stands for thymidine
ucacaagccucuuccaggann

SEQ ID NO: 3497 - RNA, 21 nt, Artificial Sequence
  Description of Artificial Sequence:  siNA antisense region
  misc_feature (20)..(21): n stands for thymidine
gucacaagccucuuccaggnn

SEQ ID NO: 3498 - RNA, 21 nt, Artificial Sequence
  Description of Artificial Sequence:  siNA antisense region
  misc_feature (20)..(21): n stands for thymidine
ggucacaagccucuuccagnn

SEQ ID NO: 3499 - RNA, 21 nt, Artificial Sequence
  Description of Artificial Sequence:  siNA antisense region
  misc_feature (20)..(21): n stands for thymidine
uugggucacaagccucuucnn

SEQ ID NO: 3500 - RNA, 21 nt, Artificial Sequence
  Description of Artificial Sequence:  siNA antisense region
  misc_feature (20)..(21): n stands for thymidine
aaauccuucccaucuucaann

SEQ ID NO: 3501 - RNA, 21 nt, Artificial Sequence
  Description of Artificial Sequence:  siNA antisense region
  misc_feature (20)..(21): n stands for thymidine
cccaugcccaccuccaccann

SEQ ID NO: 3502 - RNA, 21 nt, Artificial Sequence
  Description of Artificial Sequence:  siNA antisense region
  misc_feature (20)..(21): n stands for thymidine
gagucagaaacagcacaacnn

SEQ ID NO: 3503 - RNA, 21 nt, Artificial Sequence
  Description of Artificial Sequence:  siNA antisense region
  misc_feature (20)..(21): n stands for thymidine
ggagucagaaacagcacaann

SEQ ID NO: 3504 - RNA, 21 nt, Artificial Sequence
  Description of Artificial Sequence:  siNA antisense region
  misc_feature (20)..(21): n stands for thymidine
aggagucagaaacagcacann

SEQ ID NO: 3505 - RNA, 21 nt, Artificial Sequence
  Description of Artificial Sequence:  siNA antisense region
  misc_feature (20)..(21): n stands for thymidine
aaauccuuccugaaacuuunn

SEQ ID NO: 3506 - RNA, 21 nt, Artificial Sequence
  Description of Artificial Sequence:  siNA antisense region
  misc_feature (20)..(21): n stands for thymidine
aaaauccuuccugaaacuunn

SEQ ID NO: 3507 - RNA, 21 nt, Artificial Sequence
  Description of Artificial Sequence:  siNA antisense region
  misc_feature (20)..(21): n stands for thymidine
uaaaauccuuccugaaacunn

SEQ ID NO: 3508 - RNA, 21 nt, Artificial Sequence
  Description of Artificial Sequence:  siNA antisense region
  misc_feature (20)..(21): n stands for thymidine
aaaacacauuuucuuuuuunn

SEQ ID NO: 3509 - RNA, 21 nt, Artificial Sequence
  Description of Artificial Sequence:  siNA antisense region
  misc_feature (20)..(21): n stands for thymidine
acugauacaaaaugugaaunn

SEQ ID NO: 3510 - RNA, 21 nt, Artificial Sequence
  Description of Artificial Sequence:  siNA antisense region
  misc_feature (20)..(21): n stands for thymidine
uacugauacaaaaugugaann

SEQ ID NO: 3511 - RNA, 21 nt, Artificial Sequence
  Description of Artificial Sequence:  siNA antisense region
  misc_feature (20)..(21): n stands for thymidine
auacugauacaaaaugugann

SEQ ID NO: 3512 - RNA, 21 nt, Artificial Sequence
  Description of Artificial Sequence:  siNA sense region
  misc_feature (1)..(1): 5'-3 attached terminal deoxyabasic moeity
  misc_feature (1)..(2): 2'-deoxy-2'-fluoro
  misc_feature (4)..(8): 2'-deoxy-2'-fluoro
  misc_feature (10)..(10): 2'-deoxy-2'-fluoro
  misc_feature (14)..(16): 2'-deoxy-2'-fluoro
  misc_feature (18)..(19): 2'-deoxy-2'-fluoro
  misc_feature (20)..(20): n stands for thymidine
  misc_feature (21)..(21): 3'-3 attached terminal deoxyabasic moeity
ccgccucuguggguuugccnn

SEQ ID NO: 3513 - RNA, 21 nt, Artificial Sequence
  Description of Artificial Sequence:  siNA sense region
  misc_feature (1)..(1): 5'-3 attached terminal deoxyabasic moeity
  misc_feature (1)..(1): 2'-deoxy-2'-fluoro
  misc_feature (3)..(7): 2'-deoxy-2'-fluoro
  misc_feature (9)..(9): 2'-deoxy-2'-fluoro
  misc_feature (13)..(15): 2'-deoxy-2'-fluoro
  misc_feature (17)..(19): 2'-deoxy-2'-fluoro
  misc_feature (20)..(20): n stands for thymidine
  misc_feature (21)..(21): 3'-3 attached terminal deoxyabasic moeity
cgccucuguggguuugccunn

SEQ ID NO: 3514 - RNA, 21 nt, Artificial Sequence
  Description of Artificial Sequence:  siNA sense region
  misc_feature (1)..(2): 2'-deoxy-2'-fluoro
  misc_feature (1)..(1): 5'-3 attached terminal deoxyabasic moeity
  misc_feature (3)..(12): 2'-deoxy
  misc_feature (13)..(15): 2'-deoxy-2'-fluoro
  misc_feature (16)..(16): 2'-deoxy
  misc_feature (17)..(19): 2'-deoxy-2'-fluoro
  misc_feature (20)..(20): n stands for thymidine
  misc_feature (21)..(21): 3'-3 attached terminal deoxyabasic moeity
ccagaaaagagauuuguucnn

SEQ ID NO: 3515 - RNA, 21 nt, Artificial Sequence
  Description of Artificial Sequence:  siNA sense region
  misc_feature (1)..(2): 2'-deoxy
  misc_feature (1)..(1): 5'-3 attached terminal deoxyabasic moeity
  misc_feature (3)..(3): 2'-deoxy-2'-fluoro
  misc_feature (4)..(7): 2'-deoxy
  misc_feature (8)..(13): 2'-deoxy-2'-fluoro
  misc_feature (14)..(17): 2'-deoxy
  misc_feature (18)..(18): 2'-deoxy-2'-fluoro
  misc_feature (19)..(19): 2'-deoxy
  misc_feature (20)..(20): n stands for thymidine
  misc_feature (21)..(21): 3'-3 attached terminal deoxyabasic moeity
aacagaauuuccugggacann

SEQ ID NO: 3516 - RNA, 21 nt, Artificial Sequence
  Description of Artificial Sequence:  siNA sense region
  misc_feature (1)..(1): 5'-3 attached terminal deoxyabasic moeity
  misc_feature (1)..(3): 2'-deoxy-2'-fluoro
  misc_feature (4)..(4): 2'-deoxy
  misc_feature (5)..(8): 2'-deoxy-2'-fluoro
  misc_feature (9)..(11): 2'-deoxy
  misc_feature (12)..(13): 2'-deoxy-2'-fluoro
  misc_feature (14)..(14): 2'-deoxy
  misc_feature (15)..(15): 2'-deoxy-2'-fluoro
  misc_feature (16)..(16): 2'-deoxy
  misc_feature (17)..(17): 2'-deoxy-2'-fluoro
  misc_feature (18)..(19): 2'-deoxy
  misc_feature (20)..(20): n stands for thymidine
  misc_feature (21)..(21): 3'-3 attached terminal deoxyabasic moeity
cuugucuuaaauuguacagnn

SEQ ID NO: 3517 - RNA, 21 nt, Artificial Sequence
  Description of Artificial Sequence:  siNA sense region
  misc_feature (1)..(9): 2'-deoxy
  misc_feature (1)..(1): 5'-3 attached terminal deoxyabasic moeity
  misc_feature (10)..(10): 2'-deoxy-2'-fluoro
  misc_feature (11)..(14): 2'-deoxy
  misc_feature (15)..(16): 2'-deoxy-2'-fluoro
  misc_feature (17)..(17): 2'-deoxy
  misc_feature (18)..(18): 2'-deoxy-2'-fluoro
  misc_feature (19)..(19): 2'-deoxy
  misc_feature (20)..(20): n stands for thymidine
  misc_feature (21)..(21): 3'-3 attached terminal deoxyabasic moeity
aggaaaaaacaaaacuguann

SEQ ID NO: 3518 - RNA, 21 nt, Artificial Sequence
  Description of Artificial Sequence:  siNA sense region
  misc_feature (1)..(1): 5'-3 attached terminal deoxyabasic moeity
  misc_feature (1)..(8): 2'-deoxy
  misc_feature (9)..(9): 2'-deoxy-2'-fluoro
  misc_feature (10)..(13): 2'-deoxy
  misc_feature (14)..(15): 2'-deoxy-2'-fluoro
  misc_feature (16)..(16): 2'-deoxy
  misc_feature (17)..(17): 2'-deoxy-2'-fluoro
  misc_feature (18)..(19): 2'-deoxy
  misc_feature (20)..(20): n stands for thymidine
  misc_feature (21)..(21): 3'-3 attached terminal deoxyabasic moeity
ggaaaaaacaaaacuguaann

SEQ ID NO: 3519 - RNA, 21 nt, Artificial Sequence
  Description of Artificial Sequence:  siNA sense region
  misc_feature (1)..(1): 2'-deoxy-2'-fluoro
  misc_feature (1)..(1): 5'-3 attached terminal deoxyabasic moeity
  misc_feature (2)..(6): 2'-deoxy
  misc_feature (7)..(10): 2'-deoxy-2'-fluoro
  misc_feature (11)..(14): 2'-deoxy
  misc_feature (15)..(16): 2'-deoxy-2'-fluoro
  misc_feature (17)..(17): 2'-deoxy
  misc_feature (18)..(19): 2'-deoxy-2'-fluoro
  misc_feature (20)..(20): n stands for thymidine
  misc_feature (21)..(21): 3'-3 attached terminal deoxyabasic moeity
cagggguccugaaauuacunn

SEQ ID NO: 3520 - RNA, 21 nt, Artificial Sequence
  Description of Artificial Sequence:  siNA sense region
  misc_feature (1)..(1): 5'-3 attached terminal deoxyabasic moeity
  misc_feature (1)..(2): 2'-deoxy
  misc_feature (3)..(4): 2'-deoxy-2'-fluoro
  misc_feature (5)..(13): 2'-deoxy
  misc_feature (14)..(14): 2'-deoxy-2'-fluoro
  misc_feature (15)..(15): 2'-deoxy
  misc_feature (16)..(17): 2'-deoxy-2'-fluoro
  misc_feature (18)..(18): 2'-deoxy
  misc_feature (19)..(19): 2'-deoxy-2'-fluoro
  misc_feature (20)..(20): n stands for thymidine
  misc_feature (21)..(21): 3'-3 attached terminal deoxyabasic moeity
gaccaagaaaagacauugcnn

SEQ ID NO: 3521 - RNA, 21 nt, Artificial Sequence
  Description of Artificial Sequence:  siNA sense region
  misc_feature (1)..(1): 2'-deoxy
  misc_feature (1)..(1): 5'-3 attached terminal deoxyabasic moeity
  misc_feature (2)..(6): 2'-deoxy-2'-fluoro
  misc_feature (7)..(7): 2'-deoxy
  misc_feature (8)..(8): 2'-deoxy-2'-fluoro
  misc_feature (9)..(9): 2'-deoxy
  misc_feature (10)..(12): 2'-deoxy-2'-fluoro
  misc_feature (13)..(13): 2'-deoxy
  misc_feature (14)..(15): 2'-deoxy-2'-fluoro
  misc_feature (16)..(18): 2'-deoxy
  misc_feature (19)..(19): 2'-deoxy-2'-fluoro
  misc_feature (20)..(20): n stands for thymidine
  misc_feature (21)..(21): 3'-3 attached terminal deoxyabasic moeity
gccucuacaccugccaggcnn

SEQ ID NO: 3522 - RNA, 21 nt, Artificial Sequence
  Description of Artificial Sequence:  siNA sense region
  misc_feature (1)..(1): 5'-3 attached terminal deoxyabasic moeity
  misc_feature (1)..(2): 2'-deoxy-2'-fluoro
  misc_feature (3)..(3): 2'-deoxy
  misc_feature (4)..(5): 2'-deoxy-2'-fluoro
  misc_feature (6)..(6): 2'-deoxy
  misc_feature (7)..(7): 2'-deoxy-2'-fluoro
  misc_feature (8)..(8): 2'-deoxy
  misc_feature (9)..(15): 2'-deoxy-2'-fluoro
  misc_feature (16)..(17): 2'-deoxy
  misc_feature (18)..(19): 2'-deoxy-2'-fluoro
  misc_feature (20)..(20): n stands for thymidine
  misc_feature (21)..(21): 3'-3 attached terminal deoxyabasic moeity
uugccauguucuucuggcunn

SEQ ID NO: 3523 - RNA, 21 nt, Artificial Sequence
  Description of Artificial Sequence:  siNA sense region
  misc_feature (1)..(7): 2'-deoxy
  misc_feature (1)..(1): 5'-3 attached terminal deoxyabasic moeity
  misc_feature (8)..(9): 2'-deoxy-2'-fluoro
  misc_feature (10)..(14): 2'-deoxy
  misc_feature (15)..(15): 2'-deoxy-2'-fluoro
  misc_feature (16)..(18): 2'-deoxy
  misc_feature (19)..(19): 2'-deoxy-2'-fluoro
  misc_feature (20)..(20): n stands for thymidine
  misc_feature (21)..(21): 3'-3 attached terminal deoxyabasic moeity
aggggaacugaagacaggcnn

SEQ ID NO: 3524 - RNA, 21 nt, Artificial Sequence
  Description of Artificial Sequence:  siNA sense region
  misc_feature (1)..(1): 5'-3 attached terminal deoxyabasic moeity
  misc_feature (1)..(4): 2'-O-methyl
  misc_feature (5)..(6): 2'-deoxy-2'-fluoro
  misc_feature (7)..(11): 2'-O-methyl
  misc_feature (12)..(12): 2'-deoxy-2'-fluoro
  misc_feature (13)..(15): 2'-O-methyl
  misc_feature (16)..(17): 2'-deoxy-2'-fluoro
  misc_feature (18)..(18): 2'-O-methyl
  misc_feature (19)..(19): 2'-deoxy-2'-fluoro
  misc_feature (20)..(20): n stands for thymidine
  misc_feature (21)..(21): 3'-3 attached terminal deoxyabasic moeity
ggaacugaagacaggcuacnn

SEQ ID NO: 3525 - RNA, 21 nt, Artificial Sequence
  Description of Artificial Sequence:  siNA sense region
  misc_feature (1)..(3): 2'-O-methyl
  misc_feature (1)..(1): 5'-3 attached terminal deoxyabasic moeity
  misc_feature (4)..(5): 2'-deoxy-2'-fluoro
  misc_feature (6)..(10): 2'-O-methyl
  misc_feature (11)..(11): 2'-deoxy-2'-fluoro
  misc_feature (12)..(14): 2'-O-methyl
  misc_feature (15)..(16): 2'-deoxy-2'-fluoro
  misc_feature (17)..(17): 2'-O-methyl
  misc_feature (18)..(19): 2'-deoxy-2'-fluoro
  misc_feature (20)..(20): n stands for thymidine
  misc_feature (21)..(21): 3'-3 attached terminal deoxyabasic moeity
gaacugaagacaggcuacunn

SEQ ID NO: 3526 - RNA, 21 nt, Artificial Sequence
  Description of Artificial Sequence:  siNA sense region
  misc_feature (1)..(1): 5'-3 attached terminal deoxyabasic moeity
  misc_feature (1)..(2): 2'-deoxy
  misc_feature (3)..(4): 2'-deoxy-2'-fluoro
  misc_feature (5)..(9): 2'-deoxy
  misc_feature (10)..(10): 2'-deoxy-2'-fluoro
  misc_feature (11)..(13): 2'-deoxy
  misc_feature (14)..(15): 2'-deoxy-2'-fluoro
  misc_feature (16)..(16): 2'-deoxy
  misc_feature (17)..(19): 2'-deoxy-2'-fluoro
  misc_feature (20)..(20): n stands for thymidine
  misc_feature (21)..(21): 3'-3 attached terminal deoxyabasic moeity
aacugaagacaggcuacuunn

SEQ ID NO: 3527 - RNA, 21 nt, Artificial Sequence
  Description of Artificial Sequence:  siNA sense region
  misc_feature (1)..(2): 2'-deoxy-2'-fluoro
  misc_feature (1)..(1): 5'-3 attached terminal deoxyabasic moeity
  misc_feature (3)..(7): 2'-deoxy
  misc_feature (8)..(8): 2'-deoxy-2'-fluoro
  misc_feature (9)..(11): 2'-deoxy
  misc_feature (12)..(13): 2'-deoxy-2'-fluoro
  misc_feature (14)..(14): 2'-deoxy
  misc_feature (15)..(17): 2'-deoxy-2'-fluoro
  misc_feature (18)..(18): 2'-deoxy
  misc_feature (19)..(19): 2'-deoxy-2'-fluoro
  misc_feature (20)..(20): n stands for thymidine
  misc_feature (21)..(21): 3'-3 attached terminal deoxyabasic moeity
cugaagacaggcuacuugunn

SEQ ID NO: 3528 - RNA, 21 nt, Artificial Sequence
  Description of Artificial Sequence:  siNA sense region
  misc_feature (1)..(1): 5'-3 attached terminal deoxyabasic moeity
  misc_feature (1)..(1): 2'-deoxy-2'-fluoro
  misc_feature (2)..(2): 2'-deoxy
  misc_feature (3)..(6): 2'-deoxy-2'-fluoro
  misc_feature (7)..(7): 2'-deoxy
  misc_feature (8)..(8): 2'-deoxy-2'-fluoro
  misc_feature (9)..(10): 2'-deoxy
  misc_feature (11)..(11): 2'-deoxy-2'-fluoro
  misc_feature (12)..(12): 2'-deoxy
  misc_feature (13)..(14): 2'-deoxy-2'-fluoro
  misc_feature (15)..(16): 2'-deoxy
  misc_feature (17)..(17): 2'-deoxy-2'-fluoro
  misc_feature (18)..(19): 2'-deoxy
  misc_feature (20)..(20): n stands for thymidine
  misc_feature (21)..(21): 3'-3 attached terminal deoxyabasic moeity
ugccuuaugaugccagcaann

SEQ ID NO: 3529 - RNA, 21 nt, Artificial Sequence
  Description of Artificial Sequence:  siNA sense region
  misc_feature (1)..(1): 2'-deoxy-2'-fluoro
  misc_feature (1)..(1): 5'-3 attached terminal deoxyabasic moeity
  misc_feature (2)..(2): 2'-deoxy
  misc_feature (3)..(5): 2'-deoxy-2'-fluoro
  misc_feature (6)..(8): 2'-deoxy
  misc_feature (9)..(9): 2'-deoxy-2'-fluoro
  misc_feature (10)..(11): 2'-deoxy
  misc_feature (12)..(12): 2'-deoxy-2'-fluoro
  misc_feature (13)..(13): 2'-deoxy
  misc_feature (14)..(15): 2'-deoxy-2'-fluoro
  misc_feature (16)..(16): 2'-deoxy
  misc_feature (17)..(18): 2'-deoxy-2'-fluoro
  misc_feature (19)..(19): 2'-deoxy
  misc_feature (20)..(20): n stands for thymidine
  misc_feature (21)..(21): 3'-3 attached terminal deoxyabasic moeity
cgcuuggacagcaucaccann

SEQ ID NO: 3530 - RNA, 21 nt, Artificial Sequence
  Description of Artificial Sequence:  siNA sense region
  misc_feature (1)..(1): 5'-3 attached terminal deoxyabasic moeity
  misc_feature (1)..(4): 2'-deoxy
  misc_feature (5)..(10): 2'-deoxy-2'-fluoro
  misc_feature (11)..(12): 2'-deoxy
  misc_feature (13)..(16): 2'-deoxy-2'-fluoro
  misc_feature (17)..(19): 2'-deoxy
  misc_feature (20)..(20): n stands for thymidine
  misc_feature (21)..(21): 3'-3 attached terminal deoxyabasic moeity
aggacuuccugaccuuggann

SEQ ID NO: 3531 - RNA, 21 nt, Artificial Sequence
  Description of Artificial Sequence:  siNA sense region
  misc_feature (1)..(3): 2'-deoxy-2'-fluoro
  misc_feature (1)..(1): 5'-3 attached terminal deoxyabasic moeity
  misc_feature (4)..(7): 2'-deoxy
  misc_feature (8)..(8): 2'-deoxy-2'-fluoro
  misc_feature (9)..(9): 2'-deoxy
  misc_feature (10)..(13): 2'-deoxy-2'-fluoro
  misc_feature (14)..(14): 2'-deoxy
  misc_feature (15)..(17): 2'-deoxy-2'-fluoro
  misc_feature (18)..(18): 2'-deoxy
  misc_feature (19)..(19): 2'-deoxy-2'-fluoro
  misc_feature (20)..(20): n stands for thymidine
  misc_feature (21)..(21): 3'-3 attached terminal deoxyabasic moeity
cuuggagcaucucaucugunn

SEQ ID NO: 3532 - RNA, 21 nt, Artificial Sequence
  Description of Artificial Sequence:  siNA sense region
  misc_feature (1)..(1): 5'-3 attached terminal deoxyabasic moeity
  misc_feature (1)..(1): 2'-deoxy-2'-fluoro
  misc_feature (2)..(5): 2'-deoxy
  misc_feature (6)..(6): 2'-deoxy-2'-fluoro
  misc_feature (7)..(7): 2'-deoxy
  misc_feature (8)..(11): 2'-deoxy-2'-fluoro
  misc_feature (12)..(12): 2'-deoxy
  misc_feature (13)..(15): 2'-deoxy-2'-fluoro
  misc_feature (16)..(16): 2'-deoxy
  misc_feature (17)..(18): 2'-deoxy-2'-fluoro
  misc_feature (19)..(19): 2'-deoxy
  misc_feature (20)..(20): n stands for thymidine
  misc_feature (21)..(21): 3'-3 attached terminal deoxyabasic moeity
uggagcaucucaucuguuann

SEQ ID NO: 3533 - RNA, 21 nt, Artificial Sequence
  Description of Artificial Sequence:  siNA sense region
  misc_feature (1)..(4): 2'-deoxy
  misc_feature (1)..(1): 5'-3 attached terminal deoxyabasic moeity
  misc_feature (5)..(5): 2'-deoxy-2'-fluoro
  misc_feature (6)..(6): 2'-deoxy
  misc_feature (7)..(10): 2'-deoxy-2'-fluoro
  misc_feature (11)..(11): 2'-deoxy
  misc_feature (12)..(14): 2'-deoxy-2'-fluoro
  misc_feature (15)..(15): 2'-deoxy
  misc_feature (16)..(17): 2'-deoxy-2'-fluoro
  misc_feature (18)..(18): 2'-deoxy
  misc_feature (19)..(19): 2'-deoxy-2'-fluoro
  misc_feature (20)..(20): n stands for thymidine
  misc_feature (21)..(21): 3'-3 attached terminal deoxyabasic moeity
ggagcaucucaucuguuacnn

SEQ ID NO: 3534 - RNA, 21 nt, Artificial Sequence
  Description of Artificial Sequence:  siNA sense region
  misc_feature (1)..(1): 5'-3 attached terminal deoxyabasic moeity
  misc_feature (1)..(1): 2'-deoxy
  misc_feature (2)..(2): 2'-deoxy-2'-fluoro
  misc_feature (2)..(2): 2'-deoxy-2'-fluoro
  misc_feature (3)..(3): 2'-deoxy
  misc_feature (4)..(7): 2'-deoxy-2'-fluoro
  misc_feature (8)..(8): 2'-deoxy
  misc_feature (9)..(11): 2'-deoxy-2'-fluoro
  misc_feature (12)..(12): 2'-deoxy
  misc_feature (13)..(14): 2'-deoxy-2'-fluoro
  misc_feature (15)..(15): 2'-deoxy
  misc_feature (16)..(16): 2'-deoxy-2'-fluoro
  misc_feature (17)..(18): 2'-deoxy
  misc_feature (19)..(19): 2'-deoxy-2'-fluoro
  misc_feature (20)..(20): n stands for thymidine
  misc_feature (21)..(21): 3'-3 attached terminal deoxyabasic moeity
gcaucucaucuguuacagcnn

SEQ ID NO: 3535 - RNA, 21 nt, Artificial Sequence
  Description of Artificial Sequence:  siNA sense region
  misc_feature (1)..(3): 2'-deoxy-2'-fluoro
  misc_feature (1)..(1): 5'-3 attached terminal deoxyabasic moeity
  misc_feature (4)..(4): 2'-deoxy
  misc_feature (5)..(6): 2'-deoxy-2'-fluoro
  misc_feature (7)..(7): 2'-deoxy
  misc_feature (8)..(8): 2'-deoxy-2'-fluoro
  misc_feature (9)..(10): 2'-deoxy
  misc_feature (11)..(15): 2'-deoxy-2'-fluoro
  misc_feature (16)..(18): 2'-deoxy
  misc_feature (19)..(19): 2'-deoxy-2'-fluoro
  misc_feature (20)..(20): n stands for thymidine
  misc_feature (21)..(21): 3'-3 attached terminal deoxyabasic moeity
ucuguuacagcuuccaagunn

SEQ ID NO: 3536 - RNA, 21 nt, Artificial Sequence
  Description of Artificial Sequence:  siNA sense region
  misc_feature (1)..(1): 5'-3 attached terminal deoxyabasic moeity
  misc_feature (1)..(2): 2'-deoxy-2'-fluoro
  misc_feature (3)..(3): 2'-deoxy
  misc_feature (4)..(4): 2'-deoxy-2'-fluoro
  misc_feature (5)..(6): 2'-deoxy
  misc_feature (7)..(11): 2'-deoxy-2'-fluoro
  misc_feature (12)..(14): 2'-deoxy
  misc_feature (15)..(15): 2'-deoxy-2'-fluoro
  misc_feature (16)..(17): 2'-deoxy
  misc_feature (18)..(19): 2'-deoxy-2'-fluoro
  misc_feature (20)..(20): n stands for thymidine
  misc_feature (21)..(21): 3'-3 attached terminal deoxyabasic moeity
uuacagcuuccaaguggcunn

SEQ ID NO: 3537 - RNA, 21 nt, Artificial Sequence
  Description of Artificial Sequence:  siNA sense region
  misc_feature (1)..(1): 2'-deoxy-2'-fluoro
  misc_feature (1)..(1): 5'-3 attached terminal deoxyabasic moeity
  misc_feature (2)..(4): 2'-deoxy
  misc_feature (5)..(5): 2'-deoxy-2'-fluoro
  misc_feature (6)..(7): 2'-deoxy
  misc_feature (8)..(9): 2'-deoxy-2'-fluoro
  misc_feature (10)..(14): 2'-deoxy
  misc_feature (15)..(15): 2'-deoxy-2'-fluoro
  misc_feature (16)..(16): 2'-deoxy
  misc_feature (17)..(17): 2'-deoxy-2'-fluoro
  misc_feature (18)..(19): 2'-deoxy
  misc_feature (20)..(20): n stands for thymidine
  misc_feature (21)..(21): 3'-3 attached terminal deoxyabasic moeity
caaguggcuaagggcauggnn

SEQ ID NO: 3538 - RNA, 21 nt, Artificial Sequence
  Description of Artificial Sequence:  siNA sense region
  misc_feature (1)..(1): 5'-3 attached terminal deoxyabasic moeity
  misc_feature (1)..(2): 2'-deoxy
  misc_feature (3)..(3): 2'-deoxy-2'-fluoro
  misc_feature (4)..(4): 2'-deoxy
  misc_feature (5)..(5): 2'-deoxy-2'-fluoro
  misc_feature (6)..(9): 2'-deoxy
  misc_feature (10)..(14): 2'-deoxy-2'-fluoro
  misc_feature (15)..(16): 2'-deoxy
  misc_feature (17)..(17): 2'-deoxy-2'-fluoro
  misc_feature (18)..(18): 2'-deoxy
  misc_feature (19)..(19): 2'-deoxy-2'-fluoro
  misc_feature (20)..(20): n stands for thymidine
  misc_feature (21)..(21): 3'-3 attached terminal deoxyabasic moeity
ggcauggaguucuuggcaunn

SEQ ID NO: 3539 - RNA, 21 nt, Artificial Sequence
  Description of Artificial Sequence:  siNA sense region
  misc_feature (1)..(1): 2'-deoxy
  misc_feature (1)..(1): 5'-3 attached terminal deoxyabasic moeity
  misc_feature (2)..(2): 2'-deoxy-2'-fluoro
  misc_feature (3)..(3): 2'-deoxy
  misc_feature (4)..(4): 2'-deoxy-2'-fluoro
  misc_feature (5)..(8): 2'-deoxy
  misc_feature (9)..(13): 2'-deoxy-2'-fluoro
  misc_feature (14)..(15): 2'-deoxy
  misc_feature (16)..(16): 2'-deoxy-2'-fluoro
  misc_feature (17)..(17): 2'-deoxy
  misc_feature (19)..(19): 2'-deoxy-2'-fluoro
  misc_feature (20)..(20): n stands for thymidine
  misc_feature (21)..(21): 3'-3 attached terminal deoxyabasic moeity
gcauggaguucuuggcaucnn

SEQ ID NO: 3540 - RNA, 21 nt, Artificial Sequence
  Description of Artificial Sequence:  siNA sense region
  misc_feature (1)..(1): 5'-3 attached terminal deoxyabasic moeity
  misc_feature (1)..(1): 2'-deoxy
  misc_feature (2)..(2): 2'-deoxy-2'-fluoro
  misc_feature (3)..(3): 2'-deoxy
  misc_feature (4)..(4): 2'-deoxy-2'-fluoro
  misc_feature (5)..(13): 2'-deoxy
  misc_feature (14)..(17): 2'-deoxy-2'-fluoro
  misc_feature (18)..(19): 2'-deoxy
  misc_feature (20)..(20): n stands for thymidine
  misc_feature (21)..(21): 3'-3 attached terminal deoxyabasic moeity
gcauggaagaggauucuggnn

SEQ ID NO: 3541 - RNA, 21 nt, Artificial Sequence
  Description of Artificial Sequence:  siNA sense region
  misc_feature (1)..(1): 2'-deoxy-2'-fluoro
  misc_feature (1)..(1): 5'-3 attached terminal deoxyabasic moeity
  misc_feature (2)..(2): 2'-deoxy
  misc_feature (3)..(3): 2'-deoxy-2'-fluoro
  misc_feature (4)..(12): 2'-deoxy
  misc_feature (13)..(16): 2'-deoxy-2'-fluoro
  misc_feature (17)..(19): 2'-deoxy
  misc_feature (20)..(20): n stands for thymidine
  misc_feature (21)..(21): 3'-3 attached terminal deoxyabasic moeity
cauggaagaggauucuggann

SEQ ID NO: 3542 - RNA, 21 nt, Artificial Sequence
  Description of Artificial Sequence:  siNA sense region
  misc_feature (1)..(1): 5'-3 attached terminal deoxyabasic moeity
  misc_feature (1)..(1): 2'-deoxy-2'-fluoro
  misc_feature (2)..(10): 2'-deoxy
  misc_feature (11)..(14): 2'-deoxy-2'-fluoro
  misc_feature (15)..(17): 2'-deoxy
  misc_feature (18)..(19): 2'-deoxy-2'-fluoro
  misc_feature (20)..(20): n stands for thymidine
  misc_feature (21)..(21): 3'-3 attached terminal deoxyabasic moeity
uggaagaggauucuggacunn

SEQ ID NO: 3543 - RNA, 21 nt, Artificial Sequence
  Description of Artificial Sequence:  siNA sense region
  misc_feature (1)..(2): 2'-deoxy-2'-fluoro
  misc_feature (1)..(1): 5'-3 attached terminal deoxyabasic moeity
  misc_feature (3)..(3): 2'-deoxy
  misc_feature (4)..(6): 2'-deoxy-2'-fluoro
  misc_feature (7)..(7): 2'-deoxy
  misc_feature (8)..(11): 2'-deoxy-2'-fluoro
  misc_feature (12)..(12): 2'-deoxy
  misc_feature (13)..(15): 2'-deoxy-2'-fluoro
  misc_feature (16)..(16): 2'-deoxy
  misc_feature (17)..(19): 2'-deoxy-2'-fluoro
  misc_feature (20)..(20): n stands for thymidine
  misc_feature (21)..(21): 3'-3 attached terminal deoxyabasic moeity
cugccuaccucaccuguuunn

SEQ ID NO: 3544 - RNA, 21 nt, Artificial Sequence
  Description of Artificial Sequence:  siNA sense region
  misc_feature (1)..(1): 5'-3 attached terminal deoxyabasic moeity
  misc_feature (1)..(1): 2'-deoxy-2'-fluoro
  misc_feature (2)..(2): 2'-deoxy
  misc_feature (3)..(5): 2'-deoxy-2'-fluoro
  misc_feature (6)..(6): 2'-deoxy
  misc_feature (7)..(10): 2'-deoxy-2'-fluoro
  misc_feature (11)..(11): 2'-deoxy
  misc_feature (12)..(14): 2'-deoxy-2'-fluoro
  misc_feature (15)..(15): 2'-deoxy
  misc_feature (16)..(19): 2'-deoxy-2'-fluoro
  misc_feature (20)..(20): n stands for thymidine
  misc_feature (21)..(21): 3'-3 attached terminal deoxyabasic moeity
ugccuaccucaccuguuucnn

SEQ ID NO: 3545 - RNA, 21 nt, Artificial Sequence
  Description of Artificial Sequence:  siNA sense region
  misc_feature (1)..(1): 2'-deoxy
  misc_feature (1)..(1): 5'-3 attached terminal deoxyabasic moeity
  misc_feature (2)..(4): 2'-deoxy-2'-fluoro
  misc_feature (5)..(5): 2'-deoxy
  misc_feature (6)..(9): 2'-deoxy-2'-fluoro
  misc_feature (10)..(10): 2'-deoxy
  misc_feature (11)..(13): 2'-deoxy-2'-fluoro
  misc_feature (14)..(14): 2'-deoxy
  misc_feature (15)..(19): 2'-deoxy-2'-fluoro
  misc_feature (20)..(20): n stands for thymidine
  misc_feature (21)..(21): 3'-3 attached terminal deoxyabasic moeity
gccuaccucaccuguuuccnn

SEQ ID NO: 3546 - RNA, 21 nt, Artificial Sequence
  Description of Artificial Sequence:  siNA sense region
  misc_feature (1)..(1): 5'-3 attached terminal deoxyabasic moeity
  misc_feature (1)..(2): 2'-deoxy-2'-fluoro
  misc_feature (3)..(3): 2'-deoxy
  misc_feature (4)..(6): 2'-deoxy-2'-fluoro
  misc_feature (7)..(7): 2'-deoxy
  misc_feature (8)..(13): 2'-deoxy-2'-fluoro
  misc_feature (14)..(14): 2'-deoxy
  misc_feature (15)..(15): 2'-deoxy-2'-fluoro
  misc_feature (16)..(16): 2'-deoxy
  misc_feature (17)..(17): 2'-deoxy-2'-fluoro
  misc_feature (18)..(19): 2'-deoxy
  misc_feature (20)..(20): n stands for thymidine
  misc_feature (21)..(21): 3'-3 attached terminal deoxyabasic moeity
ucaccuguuuccuguauggnn

SEQ ID NO: 3547 - RNA, 21 nt, Artificial Sequence
  Description of Artificial Sequence:  siNA sense region
  misc_feature (1)..(1): 2'-deoxy
  misc_feature (1)..(1): 5'-3 attached terminal deoxyabasic moeity
  misc_feature (2)..(5): 2'-deoxy-2'-fluoro
  misc_feature (6)..(6): 2'-deoxy
  misc_feature (7)..(8): 2'-deoxy-2'-fluoro
  misc_feature (9)..(9): 2'-deoxy
  misc_feature (10)..(10): 2'-deoxy-2'-fluoro
  misc_feature (11)..(12): 2'-deoxy
  misc_feature (13)..(13): 2'-deoxy-2'-fluoro
  misc_feature (14)..(15): 2'-deoxy
  misc_feature (16)..(16): 2'-deoxy-2'-fluoro
  misc_feature (17)..(17): 2'-deoxy
  misc_feature (18)..(18): 2'-deoxy-2'-fluoro
  misc_feature (19)..(19): 2'-deoxy
  misc_feature (20)..(20): n stands for thymidine
  misc_feature (21)..(21): 3'-3 attached terminal deoxyabasic moeity
auuccauuaugacaacacann

SEQ ID NO: 3548 - RNA, 21 nt, Artificial Sequence
  Description of Artificial Sequence:  siNA sense region
  misc_feature (1)..(1): 5'-3 attached terminal deoxyabasic moeity
  misc_feature (1)..(1): 2'-deoxy-2'-fluoro
  misc_feature (2)..(2): 2'-deoxy
  misc_feature (3)..(4): 2'-deoxy-2'-fluoro
  misc_feature (5)..(5): 2'-deoxy
  misc_feature (6)..(6): 2'-deoxy-2'-fluoro
  misc_feature (7)..(8): 2'-deoxy
  misc_feature (9)..(9): 2'-deoxy-2'-fluoro
  misc_feature (10)..(11): 2'-deoxy
  misc_feature (12)..(12): 2'-deoxy-2'-fluoro
  misc_feature (13)..(13): 2'-deoxy
  misc_feature (14)..(14): 2'-deoxy-2'-fluoro
  misc_feature (15)..(16): 2'-deoxy
  misc_feature (17)..(17): 2'-deoxy-2'-fluoro
  misc_feature (18)..(19): 2'-deoxy
  misc_feature (20)..(20): n stands for thymidine
  misc_feature (21)..(21): 3'-3 attached terminal deoxyabasic moeity
cauuaugacaacacagcagnn

SEQ ID NO: 3549 - RNA, 21 nt, Artificial Sequence
  Description of Artificial Sequence:  siNA antisense region
  misc_feature (7)..(9): 2'-deoxy-2'-fluoro
  misc_feature (11)..(11): 2'-deoxy-2'-fluoro
  misc_feature (17)..(17): 2'-deoxy-2'-fluoro
  misc_feature (20)..(21): n stands for thymidine
ggcaaacccacagaggcggnn

SEQ ID NO: 3550 - RNA, 21 nt, Artificial Sequence
  Description of Artificial Sequence:  siNA antisense region
  misc_feature (4)..(4): 2'-deoxy-2'-fluoro
  misc_feature (8)..(10): 2'-deoxy-2'-fluoro
  misc_feature (12)..(12): 2'-deoxy-2'-fluoro
  misc_feature (18)..(18): 2'-deoxy-2'-fluoro
  misc_feature (20)..(21): n stands for thymidine
aggcaaacccacagaggcgnn

SEQ ID NO: 3551 - RNA, 21 nt, Artificial Sequence
  Description of Artificial Sequence:  siNA antisense region
  misc_feature (4)..(4): 2'-deoxy-2'-fluoro
  misc_feature (8)..(17): 2'-deoxy-2'-fluoro
  misc_feature (20)..(21): n stands for thymidine
gaacaaaucucuuuucuggnn

SEQ ID NO: 3552 - RNA, 21 nt, Artificial Sequence
  Description of Artificial Sequence:  siNA antisense region
  misc_feature (4)..(6): 2'-deoxy-2'-fluoro
  misc_feature (13)..(16): 2'-deoxy-2'-fluoro
  misc_feature (18)..(19): 2'-deoxy-2'-fluoro
  misc_feature (20)..(21): n stands for thymidine
ugucccaggaaauucuguunn

SEQ ID NO: 3553 - RNA, 21 nt, Artificial Sequence
  Description of Artificial Sequence:  siNA antisense region
  misc_feature (4)..(4): 2'-deoxy-2'-fluoro
  misc_feature (5)..(5): 2'-O-methyl
  misc_feature (6)..(6): 2'-deoxy-2'-fluoro
  misc_feature (7)..(8): 2'-O-methyl
  misc_feature (9)..(11): 2'-deoxy-2'-fluoro
  misc_feature (12)..(15): 2'-O-methyl
  misc_feature (16)..(16): 2'-deoxy-2'-fluoro
  misc_feature (17)..(19): 2'-O-methyl
  misc_feature (20)..(21): n stands for thymidine
cuguacaauuuaagacaagnn

SEQ ID NO: 3554 - RNA, 21 nt, Artificial Sequence
  Description of Artificial Sequence:  siNA antisense region
  misc_feature (4)..(5): 2'-O-methyl
  misc_feature (6)..(9): 2'-deoxy-2'-fluoro
  misc_feature (10)..(10): 2'-O-methyl
  misc_feature (11)..(19): 2'-deoxy-2'-fluoro
  misc_feature (20)..(21): n stands for thymidine
uacaguuuuguuuuuuccunn

SEQ ID NO: 3555 - RNA, 21 nt, Artificial Sequence
  Description of Artificial Sequence:  siNA antisense region
  misc_feature (4)..(4): 2'-deoxy-2'-fluoro
  misc_feature (5)..(6): 2'-O-methyl
  misc_feature (7)..(10): 2'-deoxy-2'-fluoro
  misc_feature (11)..(11): 2'-O-methyl
  misc_feature (12)..(19): 2'-deoxy-2'-fluoro
  misc_feature (20)..(21): n stands for thymidine
uuacaguuuuguuuuuuccnn

SEQ ID NO: 3556 - RNA, 21 nt, Artificial Sequence
  Description of Artificial Sequence:  siNA antisense region
  misc_feature (4)..(5): 2'-O-methyl
  misc_feature (6)..(9): 2'-deoxy-2'-fluoro
  misc_feature (10)..(13): 2'-O-methyl
  misc_feature (14)..(18): 2'-deoxy-2'-fluoro
  misc_feature (19)..(19): 2'-O-methyl
  misc_feature (20)..(21): n stands for thymidine
aguaauuucaggaccccugnn

SEQ ID NO: 3557 - RNA, 21 nt, Artificial Sequence
  Description of Artificial Sequence:  siNA antisense region
  misc_feature (4)..(4): 2'-O-methyl
  misc_feature (5)..(5): 2'-deoxy-2'-fluoro
  misc_feature (6)..(6): 2'-O-methyl
  misc_feature (7)..(15): 2'-deoxy-2'-fluoro
  misc_feature (16)..(17): 2'-O-methyl
  misc_feature (18)..(19): 2'-deoxy-2'-fluoro
  misc_feature (20)..(21): n stands for thymidine
gcaaugucuuuucuuggucnn

SEQ ID NO: 3558 - RNA, 21 nt, Artificial Sequence
  Description of Artificial Sequence:  siNA antisense region
  misc_feature (4)..(4): 2'-deoxy-2'-fluoro
  misc_feature (5)..(6): 2'-O-methyl
  misc_feature (7)..(7): 2'-deoxy-2'-fluoro
  misc_feature (8)..(10): 2'-O-methyl
  misc_feature (11)..(11): 2'-deoxy-2'-fluoro
  misc_feature (12)..(12): 2'-O-methyl
  misc_feature (13)..(13): 2'-deoxy-2'-fluoro
  misc_feature (14)..(18): 2'-O-methyl
  misc_feature (19)..(19): 2'-deoxy-2'-fluoro
  misc_feature (20)..(21): n stands for thymidine
gccuggcagguguagaggcnn

SEQ ID NO: 3559 - RNA, 21 nt, Artificial Sequence
  Description of Artificial Sequence:  siNA antisense region
  misc_feature (4)..(4): 2'-deoxy-2'-fluoro
  misc_feature (5)..(11): 2'-O-methyl
  misc_feature (12)..(12): 2'-deoxy-2'-fluoro
  misc_feature (13)..(13): 2'-O-methyl
  misc_feature (14)..(14): 2'-deoxy-2'-fluoro
  misc_feature (15)..(16): 2'-O-methyl
  misc_feature (17)..(17): 2'-deoxy-2'-fluoro
  misc_feature (18)..(19): 2'-O-methyl
  misc_feature (20)..(21): n stands for thymidine
agccagaagaacauggcaann

SEQ ID NO: 3560 - RNA, 21 nt, Artificial Sequence
  Description of Artificial Sequence:  siNA antisense region
  misc_feature (4)..(4): 2'-deoxy-2'-fluoro
  misc_feature (5)..(5): 2'-O-methyl
  misc_feature (6)..(10): 2'-deoxy-2'-fluoro
  misc_feature (11)..(12): 2'-O-methyl
  misc_feature (13)..(19): 2'-deoxy-2'-fluoro
  misc_feature (20)..(21): n stands for thymidine
gccugucuucaguuccccunn

SEQ ID NO: 3561 - RNA, 21 nt, Artificial Sequence
  Description of Artificial Sequence:  siNA antisense region
  misc_feature (4)..(4): 2'-O-methyl
  misc_feature (5)..(7): 2'-deoxy-2'-fluoro
  misc_feature (8)..(8): 2'-O-methyl
  misc_feature (9)..(13): 2'-deoxy-2'-fluoro
  misc_feature (14)..(15): 2'-O-methyl
  misc_feature (16)..(19): 2'-deoxy-2'-fluoro
  misc_feature (20)..(21): n stands for thymidine
guagccugucuucaguuccnn

SEQ ID NO: 3562 - RNA, 21 nt, Artificial Sequence
  Description of Artificial Sequence:  siNA antisense region
  misc_feature (4)..(5): 2'-O-methyl
  misc_feature (6)..(8): 2'-deoxy-2'-fluoro
  misc_feature (9)..(9): 2'-O-methyl
  misc_feature (10)..(14): 2'-deoxy-2'-fluoro
  misc_feature (15)..(16): 2'-O-methyl
  misc_feature (17)..(19): 2'-deoxy-2'-fluoro
  misc_feature (20)..(21): n stands for thymidine
aguagccugucuucaguucnn

SEQ ID NO: 3563 - RNA, 21 nt, Artificial Sequence
  Description of Artificial Sequence:  siNA antisense region
  misc_feature (4)..(4): 2'-deoxy-2'-fluoro
  misc_feature (5)..(6): 2'-O-methyl
  misc_feature (7)..(9): 2'-deoxy-2'-fluoro
  misc_feature (10)..(10): 2'-O-methyl
  misc_feature (11)..(15): 2'-deoxy-2'-fluoro
  misc_feature (16)..(17): 2'-O-methyl
  misc_feature (18)..(19): 2'-deoxy-2'-fluoro
  misc_feature (20)..(21): n stands for thymidine
aaguagccugucuucaguunn

SEQ ID NO: 3564 - RNA, 21 nt, Artificial Sequence
  Description of Artificial Sequence:  siNA antisense region
  misc_feature (4)..(5): 2'-O-methyl
  misc_feature (6)..(6): 2'-deoxy-2'-fluoro
  misc_feature (7)..(8): 2'-O-methyl
  misc_feature (9)..(11): 2'-deoxy-2'-fluoro
  misc_feature (12)..(12): 2'-O-methyl
  misc_feature (13)..(17): 2'-deoxy-2'-fluoro
  misc_feature (18)..(19): 2'-O-methyl
  misc_feature (20)..(21): n stands for thymidine
acaaguagccugucuucagnn

SEQ ID NO: 3565 - RNA, 21 nt, Artificial Sequence
  Description of Artificial Sequence:  siNA antisense region
  misc_feature (4)..(5): 2'-deoxy-2'-fluoro
  misc_feature (6)..(7): 2'-O-methyl
  misc_feature (8)..(8): 2'-deoxy-2'-fluoro
  misc_feature (9)..(9): 2'-O-methyl
  misc_feature (10)..(11): 2'-deoxy-2'-fluoro
  misc_feature (12)..(12): 2'-O-methyl
  misc_feature (13)..(13): 2'-deoxy-2'-fluoro
  misc_feature (14)..(17): 2'-O-methyl
  misc_feature (18)..(18): 2'-deoxy-2'-fluoro
  misc_feature (19)..(19): 2'-O-methyl
  misc_feature (20)..(21): n stands for thymidine
uugcuggcaucauaaggcann

SEQ ID NO: 3566 - RNA, 21 nt, Artificial Sequence
  Description of Artificial Sequence:  siNA antisense region
  misc_feature (4)..(4): 2'-deoxy-2'-fluoro
  misc_feature (5)..(6): 2'-O-methyl
  misc_feature (7)..(7): 2'-deoxy-2'-fluoro
  misc_feature (8)..(8): 2'-O-methyl
  misc_feature (9)..(10): 2'-deoxy-2'-fluoro
  misc_feature (11)..(11): 2'-O-methyl
  misc_feature (12)..(14): 2'-deoxy-2'-fluoro
  misc_feature (15)..(17): 2'-O-methyl
  misc_feature (18)..(18): 2'-deoxy-2'-fluoro
  misc_feature (19)..(19): 2'-O-methyl
  misc_feature (20)..(21): n stands for thymidine
uggugaugcuguccaagcgnn

SEQ ID NO: 3567 - RNA, 21 nt, Artificial Sequence
  Description of Artificial Sequence:  siNA antisense region
  misc_feature (4)..(7): 2'-O-methyl
  misc_feature (8)..(9): 2'-deoxy-2'-fluoro
  misc_feature (10)..(15): 2'-O-methyl
  misc_feature (16)..(19): 2'-deoxy-2'-fluoro
  misc_feature (20)..(21): n stands for thymidine
uccaaggucaggaaguccunn

SEQ ID NO: 3568 - RNA, 21 nt, Artificial Sequence
  Description of Artificial Sequence:  siNA antisense region
  misc_feature (4)..(5): 2'-O-methyl
  misc_feature (6)..(6): 2'-deoxy-2'-fluoro
  misc_feature (7)..(10): 2'-O-methyl
  misc_feature (11)..(11): 2'-deoxy-2'-fluoro
  misc_feature (12)..(12): 2'-O-methyl
  misc_feature (13)..(16): 2'-deoxy-2'-fluoro
  misc_feature (17)..(19): 2'-O-methyl
  misc_feature (20)..(21): n stands for thymidine
acagaugagaugcuccaagnn

SEQ ID NO: 3569 - RNA, 21 nt, Artificial Sequence
  Description of Artificial Sequence:  siNA antisense region
  misc_feature (4)..(4): 2'-deoxy-2'-fluoro
  misc_feature (5)..(7): 2'-O-methyl
  misc_feature (8)..(8): 2'-deoxy-2'-fluoro
  misc_feature (9)..(12): 2'-O-methyl
  misc_feature (13)..(13): 2'-deoxy-2'-fluoro
  misc_feature (14)..(14): 2'-O-methyl
  misc_feature (15)..(18): 2'-deoxy-2'-fluoro
  misc_feature (19)..(19): 2'-O-methyl
  misc_feature (20)..(21): n stands for thymidine
uaacagaugagaugcuccann

SEQ ID NO: 3570 - RNA, 21 nt, Artificial Sequence
  Description of Artificial Sequence:  siNA antisense region
  misc_feature (4)..(4): 2'-O-methyl
  misc_feature (5)..(5): 2'-deoxy-2'-fluoro
  misc_feature (6)..(8): 2'-O-methyl
  misc_feature (9)..(9): 2'-deoxy-2'-fluoro
  misc_feature (10)..(13): 2'-O-methyl
  misc_feature (14)..(14): 2'-deoxy-2'-fluoro
  misc_feature (15)..(15): 2'-O-methyl
  misc_feature (16)..(19): 2'-deoxy-2'-fluoro
  misc_feature (20)..(21): n stands for thymidine
guaacagaugagaugcuccnn

SEQ ID NO: 3571 - RNA, 21 nt, Artificial Sequence
  Description of Artificial Sequence:  siNA antisense region
  misc_feature (4)..(4): 2'-O-methyl
  misc_feature (5)..(5): 2'-deoxy-2'-fluoro
  misc_feature (6)..(7): 2'-O-methyl
  misc_feature (8)..(8): 2'-deoxy-2'-fluoro
  misc_feature (9)..(11): 2'-O-methyl
  misc_feature (12)..(12): 2'-deoxy-2'-fluoro
  misc_feature (13)..(16): 2'-O-methyl
  misc_feature (17)..(17): 2'-deoxy-2'-fluoro
  misc_feature (18)..(18): 2'-O-methyl
  misc_feature (19)..(19): 2'-deoxy-2'-fluoro
  misc_feature (20)..(21): n stands for thymidine
gcuguaacagaugagaugcnn

SEQ ID NO: 3572 - RNA, 21 nt, Artificial Sequence
  Description of Artificial Sequence:  siNA antisense region
  misc_feature (4)..(4): 2'-deoxy-2'-fluoro
  misc_feature (5)..(9): 2'-O-methyl
  misc_feature (10)..(11): 2'-deoxy-2'-fluoro
  misc_feature (12)..(12): 2'-O-methyl
  misc_feature (13)..(13): 2'-deoxy-2'-fluoro
  misc_feature (14)..(15): 2'-O-methyl
  misc_feature (16)..(16): 2'-deoxy-2'-fluoro
  misc_feature (17)..(19): 2'-O-methyl
  misc_feature (20)..(21): n stands for thymidine
acuuggaagcuguaacagann

SEQ ID NO: 3573 - RNA, 21 nt, Artificial Sequence
  Description of Artificial Sequence:  siNA antisense region
  misc_feature (4)..(4): 2'-deoxy-2'-fluoro
  misc_feature (5)..(5): 2'-O-methyl
  misc_feature (6)..(8): 2'-deoxy-2'-fluoro
  misc_feature (9)..(13): 2'-O-methyl
  misc_feature (14)..(15): 2'-deoxy-2'-fluoro
  misc_feature (16)..(16): 2'-O-methyl
  misc_feature (17)..(17): 2'-deoxy-2'-fluoro
  misc_feature (18)..(19): 2'-O-methyl
  misc_feature (20)..(21): n stands for thymidine
agccacuuggaagcuguaann

SEQ ID NO: 3574 - RNA, 21 nt, Artificial Sequence
  Description of Artificial Sequence:  siNA antisense region
  misc_feature (4)..(4): 2'-deoxy-2'-fluoro
  misc_feature (5)..(5): 2'-O-methyl
  misc_feature (6)..(10): 2'-deoxy-2'-fluoro
  misc_feature (11)..(12): 2'-O-methyl
  misc_feature (13)..(14): 2'-deoxy-2'-fluoro
  misc_feature (15)..(15): 2'-O-methyl
  misc_feature (16)..(18): 2'-deoxy-2'-fluoro
  misc_feature (19)..(19): 2'-O-methyl
  misc_feature (20)..(21): n stands for thymidine
ccaugcccuuagccacuugnn

SEQ ID NO: 3575 - RNA, 21 nt, Artificial Sequence
  Description of Artificial Sequence:  siNA antisense region
  misc_feature (4)..(5): 2'-deoxy-2'-fluoro
  misc_feature (6)..(10): 2'-O-methyl
  misc_feature (11)..(14): 2'-deoxy-2'-fluoro
  misc_feature (15)..(15): 2'-O-methyl
  misc_feature (16)..(16): 2'-deoxy-2'-fluoro
  misc_feature (17)..(17): 2'-O-methyl
  misc_feature (18)..(19): 2'-deoxy-2'-fluoro
  misc_feature (20)..(21): n stands for thymidine
augccaagaacuccaugccnn

SEQ ID NO: 3576 - RNA, 21 nt, Artificial Sequence
  Description of Artificial Sequence:  siNA antisense region
  misc_feature (4)..(4): 2'-O-methyl
  misc_feature (5)..(6): 2'-deoxy-2'-fluoro
  misc_feature (7)..(11): 2'-O-methyl
  misc_feature (12)..(15): 2'-deoxy-2'-fluoro
  misc_feature (16)..(16): 2'-O-methyl
  misc_feature (17)..(17): 2'-deoxy-2'-fluoro
  misc_feature (18)..(18): 2'-O-methyl
  misc_feature (19)..(19): 2'-deoxy-2'-fluoro
  misc_feature (20)..(21): n stands for thymidine
gaugccaagaacuccaugcnn

SEQ ID NO: 3577 - RNA, 21 nt, Artificial Sequence
  Description of Artificial Sequence:  siNA antisense region
  misc_feature (4)..(4): 2'-O-methyl
  misc_feature (5)..(6): 2'-deoxy-2'-fluoro
  misc_feature (7)..(8): 2'-O-methyl
  misc_feature (9)..(12): 2'-deoxy-2'-fluoro
  misc_feature (13)..(17): 2'-O-methyl
  misc_feature (18)..(18): 2'-deoxy-2'-fluoro
  misc_feature (19)..(19): 2'-O-methyl
  misc_feature (20)..(21): n stands for thymidine
uccaccaacucugaaaacgnn

SEQ ID NO: 3578 - RNA, 21 nt, Artificial Sequence
  Description of Artificial Sequence:  siNA antisense region
  misc_feature (4)..(6): 2'-O-methyl
  misc_feature (7)..(15): 2'-deoxy-2'-fluoro
  misc_feature (16)..(16): 2'-O-methyl
  misc_feature (17)..(17): 2'-deoxy-2'-fluoro
  misc_feature (18)..(18): 2'-O-methyl
  misc_feature (19)..(19): 2'-deoxy-2'-fluoro
  misc_feature (20)..(21): n stands for thymidine
ccagaauccucuuccaugcnn

SEQ ID NO: 3579 - RNA, 21 nt, Artificial Sequence
  Description of Artificial Sequence:  siNA antisense region
  misc_feature (4)..(7): 2'-O-methyl
  misc_feature (8)..(16): 2'-deoxy-2'-fluoro
  misc_feature (17)..(17): 2'-O-methyl
  misc_feature (18)..(18): 2'-deoxy-2'-fluoro
  misc_feature (19)..(19): 2'-O-methyl
  misc_feature (20)..(21): n stands for thymidine
uccagaauccucuuccaugnn

SEQ ID NO: 3580 - RNA, 21 nt, Artificial Sequence
  Description of Artificial Sequence:  siNA antisense region
  misc_feature (4)..(5): 2'-deoxy-2'-fluoro
  misc_feature (6)..(9): 2'-O-methyl
  misc_feature (10)..(18): 2'-deoxy-2'-fluoro
  misc_feature (19)..(19): 2'-O-methyl
  misc_feature (20)..(21): n stands for thymidine
aguccagaauccucuuccann

SEQ ID NO: 3581 - RNA, 21 nt, Artificial Sequence
  Description of Artificial Sequence:  siNA antisense region
  misc_feature (4)..(4): 2'-deoxy-2'-fluoro
  misc_feature (5)..(7): 2'-O-methyl
  misc_feature (8)..(8): 2'-deoxy-2'-fluoro
  misc_feature (9)..(12): 2'-O-methyl
  misc_feature (13)..(13): 2'-deoxy-2'-fluoro
  misc_feature (14)..(16): 2'-O-methyl
  misc_feature (17)..(17): 2'-deoxy-2'-fluoro
  misc_feature (18)..(19): 2'-O-methyl
  misc_feature (20)..(21): n stands for thymidine
aaacaggugagguaggcagnn

SEQ ID NO: 3582 - RNA, 21 nt, Artificial Sequence
  Description of Artificial Sequence:  siNA antisense region
  misc_feature (4)..(4): 2'-O-methyl
  misc_feature (5)..(5): 2'-deoxy-2'-fluoro
  misc_feature (6)..(8): 2'-O-methyl
  misc_feature (9)..(9): 2'-deoxy-2'-fluoro
  misc_feature (10)..(13): 2'-O-methyl
  misc_feature (14)..(14): 2'-deoxy-2'-fluoro
  misc_feature (15)..(17): 2'-O-methyl
  misc_feature (18)..(18): 2'-deoxy-2'-fluoro
  misc_feature (19)..(19): 2'-O-methyl
  misc_feature (20)..(21): n stands for thymidine
gaaacaggugagguaggcann

SEQ ID NO: 3583 - RNA, 21 nt, Artificial Sequence
  Description of Artificial Sequence:  siNA antisense region
  misc_feature (4)..(5): 2'-O-methyl
  misc_feature (6)..(6): 2'-deoxy-2'-fluoro
  misc_feature (7)..(9): 2'-O-methyl
  misc_feature (10)..(10): 2'-deoxy-2'-fluoro
  misc_feature (11)..(14): 2'-O-methyl
  misc_feature (15)..(15): 2'-deoxy-2'-fluoro
  misc_feature (16)..(18): 2'-O-methyl
  misc_feature (19)..(19): 2'-deoxy-2'-fluoro
  misc_feature (20)..(21): n stands for thymidine
ggaaacaggugagguaggcnn

SEQ ID NO: 3584 - RNA, 21 nt, Artificial Sequence
  Description of Artificial Sequence:  siNA antisense region
  misc_feature (4)..(4): 2'-deoxy-2'-fluoro
  misc_feature (5)..(5): 2'-O-methyl
  misc_feature (6)..(6): 2'-deoxy-2'-fluoro
  misc_feature (7)..(12): 2'-O-methyl
  misc_feature (13)..(13): 2'-deoxy-2'-fluoro
  misc_feature (14)..(16): 2'-O-methyl
  misc_feature (17)..(17): 2'-deoxy-2'-fluoro
  misc_feature (18)..(19): 2'-O-methyl
  misc_feature (20)..(21): n stands for thymidine
ccauacaggaaacaggugann

SEQ ID NO: 3585 - RNA, 21 nt, Artificial Sequence
  Description of Artificial Sequence:  siNA antisense region
  misc_feature (4)..(4): 2'-O-methyl
  misc_feature (5)..(5): 2'-deoxy-2'-fluoro
  misc_feature (6)..(6): 2'-O-methyl
  misc_feature (7)..(7): 2'-deoxy-2'-fluoro
  misc_feature (8)..(13): 2'-O-methyl
  misc_feature (14)..(14): 2'-deoxy-2'-fluoro
  misc_feature (15)..(17): 2'-O-methyl
  misc_feature (18)..(18): 2'-deoxy-2'-fluoro
  misc_feature (19)..(19): 2'-O-methyl
  misc_feature (20)..(21): n stands for thymidine
uccauacaggaaacaggugnn

SEQ ID NO: 3586 - RNA, 21 nt, Artificial Sequence
  Description of Artificial Sequence:  siNA antisense region
  misc_feature (4)..(4): 2'-O-methyl
  misc_feature (5)..(6): 2'-deoxy-2'-fluoro
  misc_feature (7)..(7): 2'-O-methyl
  misc_feature (8)..(9): 2'-deoxy-2'-fluoro
  misc_feature (10)..(10): 2'-O-methyl
  misc_feature (11)..(11): 2'-deoxy-2'-fluoro
  misc_feature (12)..(13): 2'-O-methyl
  misc_feature (14)..(14): 2'-deoxy-2'-fluoro
  misc_feature (15)..(18): 2'-O-methyl
  misc_feature (19)..(19): 2'-deoxy-2'-fluoro
  misc_feature (20)..(21): n stands for thymidine
uguguugucauaauggaaunn

SEQ ID NO: 3587 - RNA, 21 nt, Artificial Sequence
  Description of Artificial Sequence:  siNA antisense region
  misc_feature (4)..(5): 2'-deoxy-2'-fluoro
  misc_feature (6)..(6): 2'-O-methyl
  misc_feature (7)..(7): 2'-deoxy-2'-fluoro
  misc_feature (8)..(8): 2'-O-methyl
  misc_feature (9)..(10): 2'-deoxy-2'-fluoro
  misc_feature (11)..(11): 2'-O-methyl
  misc_feature (12)..(13): 2'-deoxy-2'-fluoro
  misc_feature (14)..(14): 2'-O-methyl
  misc_feature (15)..(15): 2'-deoxy-2'-fluoro
  misc_feature (16)..(17): 2'-O-methyl
  misc_feature (18)..(18): 2'-deoxy-2'-fluoro
  misc_feature (19)..(19): 2'-O-methyl
  misc_feature (20)..(21): n stands for thymidine
cugcuguguugucauaaugnn

SEQ ID NO: 3588 - RNA, 21 nt, Artificial Sequence
  Description of Artificial Sequence:  siNA antisense region
  misc_feature (4)..(5): 2'-O-methyl
  misc_feature (6)..(10): 2'-deoxy-2'-fluoro
  misc_feature (11)..(11): 2'-O-methyl
  misc_feature (12)..(13): 2'-deoxy-2'-fluoro
  misc_feature (14)..(14): 2'-O-methyl
  misc_feature (15)..(15): 2'-deoxy-2'-fluoro
  misc_feature (16)..(16): 2'-O-methyl
  misc_feature (17)..(18): 2'-deoxy-2'-fluoro
  misc_feature (19)..(19): 2'-O-methyl
  misc_feature (20)..(21): n stands for thymidine
acugauuccugcuguguugnn

SEQ ID NO: 3589 - RNA, 21 nt, Artificial Sequence
  Description of Artificial Sequence:  siNA sense region
  misc_feature (20)..(21): n stands for thymidine
cacugccacaagaaguaccnn

SEQ ID NO: 3590 - RNA, 21 nt, Artificial Sequence
  Description of Artificial Sequence:  siNA sense region
  misc_feature (20)..(21): n stands for thymidine
gaagcagagagagagaaggnn

SEQ ID NO: 3591 - RNA, 21 nt, Artificial Sequence
  Description of Artificial Sequence:  siNA sense region
  misc_feature (20)..(21): n stands for thymidine
agaggaaccaggaggacaann

SEQ ID NO: 3592 - RNA, 21 nt, Artificial Sequence
  Description of Artificial Sequence:  siNA sense region
  misc_feature (20)..(21): n stands for thymidine
caagaggagcaugaaagugnn

SEQ ID NO: 3593 - RNA, 21 nt, Artificial Sequence
  Description of Artificial Sequence:  siNA antisense region
  misc_feature (20)..(21): n stands for thymidine
gguacuucuuguggcagugnn

SEQ ID NO: 3594 - RNA, 21 nt, Artificial Sequence
  Description of Artificial Sequence:  siNA antisense region
  misc_feature (20)..(21): n stands for thymidine
ccuucucucucucugcuucnn

SEQ ID NO: 3595 - RNA, 21 nt, Artificial Sequence
  Description of Artificial Sequence:  siNA antisense region
  misc_feature (20)..(21): n stands for thymidine
uuguccuccugguuccucunn

SEQ ID NO: 3596 - RNA, 21 nt, Artificial Sequence
  Description of Artificial Sequence:  siNA antisense region
  misc_feature (20)..(21): n stands for thymidine
cacuuucaugcuccucuugnn

SEQ ID NO: 3597 - RNA, 21 nt, Artificial Sequence
  Description of Artificial Sequence:  siNA sense region
  misc_feature (1)..(1): 2'-deoxy-2'-fluoro
  misc_feature (1)..(1): 5'-3 attached terminal deoxyabasic moeity
  misc_feature (3)..(4): 2'-deoxy-2'-fluoro
  misc_feature (6)..(7): 2'-deoxy-2'-fluoro
  misc_feature (9)..(9): 2'-deoxy-2'-fluoro
  misc_feature (16)..(16): 2'-deoxy-2'-fluoro
  misc_feature (18)..(19): 2'-deoxy-2'-fluoro
  misc_feature (20)..(21): n stands for thymidine
  misc_feature (21)..(21): 3'-3 attached terminal deoxyabasic moeity
cacugccacaagaaguaccnn

SEQ ID NO: 3598 - RNA, 21 nt, Artificial Sequence
  Description of Artificial Sequence:  siNA sense region
  misc_feature (1)..(1): 5'-3 attached terminal deoxyabasic moeity
  misc_feature (5)..(5): 2'-deoxy-2'-fluoro
  misc_feature (20)..(21): n stands for thymidine
  misc_feature (21)..(21): 3'-3 attached terminal deoxyabasic moeity
gaagcagagagagagaaggnn

SEQ ID NO: 3599 - RNA, 21 nt, Artificial Sequence
  Description of Artificial Sequence:  siNA sense region
  misc_feature (1)..(1): 5'-3 attached terminal deoxyabasic moeity
  misc_feature (8)..(9): 2'-deoxy-2'-fluoro
  misc_feature (17)..(17): 2'-deoxy-2'-fluoro
  misc_feature (20)..(21): n stands for thymidine
  misc_feature (21)..(21): 3'-3 attached terminal deoxyabasic moeity
agaggaaccaggaggacaann

SEQ ID NO: 3600 - RNA, 21 nt, Artificial Sequence
  Description of Artificial Sequence:  siNA sense region
  misc_feature (1)..(1): 2'-deoxy-2'-fluoro
  misc_feature (1)..(1): 5'-3 attached terminal deoxyabasic moeity
  misc_feature (10)..(10): 2'-deoxy-2'-fluoro
  misc_feature (12)..(12): 2'-deoxy-2'-fluoro
  misc_feature (18)..(18): 2'-deoxy-2'-fluoro
  misc_feature (20)..(21): n stands for thymidine
  misc_feature (21)..(21): 3'-3 attached terminal deoxyabasic moeity
caagaggagcaugaaagugnn

SEQ ID NO: 3601 - RNA, 21 nt, Artificial Sequence
  Description of Artificial Sequence:  siNA antisense region
  misc_feature (3)..(3): 2'-deoxy-2'-fluoro
  misc_feature (5)..(10): 2'-deoxy-2'-fluoro
  misc_feature (12)..(12): 2'-deoxy-2'-fluoro
  misc_feature (15)..(15): 2'-deoxy-2'-fluoro
  misc_feature (18)..(18): 2'-deoxy-2'-fluoro
  misc_feature (20)..(21): n stands for thymidine
  misc_feature (20)..(20): Phosphorothioate 3'-Internucleotide Linkage
gguacuucuuguggcagugnn

SEQ ID NO: 3602 - RNA, 21 nt, Artificial Sequence
  Description of Artificial Sequence:  siNA antisense region
  misc_feature (1)..(14): 2'-deoxy-2'-fluoro
  misc_feature (16)..(19): 2'-deoxy-2'-fluoro
  misc_feature (20)..(21): n stands for thymidine
  misc_feature (20)..(20): Phosphorothioate 3'-Internucleotide Linkage
ccuucucucucucugcuucnn

SEQ ID NO: 3603 - RNA, 21 nt, Artificial Sequence
  Description of Artificial Sequence:  siNA antisense region
  misc_feature (1)..(2): 2'-deoxy-2'-fluoro
  misc_feature (4)..(10): 2'-deoxy-2'-fluoro
  misc_feature (13)..(19): 2'-deoxy-2'-fluoro
  misc_feature (20)..(21): n stands for thymidine
  misc_feature (20)..(20): Phosphorothioate 3'-Internucleotide Linkage
uuguccuccugguuccucunn

SEQ ID NO: 3604 - RNA, 21 nt, Artificial Sequence
  Description of Artificial Sequence:  siNA antisense region
  misc_feature (1)..(1): 2'-deoxy-2'-fluoro
  misc_feature (3)..(7): 2'-deoxy-2'-fluoro
  misc_feature (9)..(9): 2'-deoxy-2'-fluoro
  misc_feature (11)..(18): 2'-deoxy-2'-fluoro
  misc_feature (20)..(21): n stands for thymidine
  misc_feature (20)..(20): Phosphorothioate 3'-Internucleotide Linkage
cacuuucaugcuccucuugnn

SEQ ID NO: 3605 - RNA, 21 nt, Artificial Sequence
  Description of Artificial Sequence:  siNA sense region
  misc_feature (1)..(1): 2'-deoxy-2'-fluoro
  misc_feature (1)..(1): 5'-3 attached terminal deoxyabasic moeity
  misc_feature (2)..(2): 2'-deoxy
  misc_feature (3)..(4): 2'-deoxy-2'-fluoro
  misc_feature (5)..(5): 2'-deoxy
  misc_feature (6)..(7): 2'-deoxy-2'-fluoro
  misc_feature (8)..(8): 2'-deoxy
  misc_feature (9)..(9): 2'-deoxy-2'-fluoro
  misc_feature (10)..(15): 2'-deoxy
  misc_feature (16)..(16): 2'-deoxy-2'-fluoro
  misc_feature (17)..(17): 2'-deoxy
  misc_feature (18)..(19): 2'-deoxy-2'-fluoro
  misc_feature (20)..(21): n stands for thymidine
  misc_feature (21)..(21): 3'-3 attached terminal deoxyabasic moeity
cacugccacaagaaguaccnn

SEQ ID NO: 3606 - RNA, 21 nt, Artificial Sequence
  Description of Artificial Sequence:  siNA sense region
  misc_feature (1)..(4): 2'-deoxy
  misc_feature (1)..(1): 5'-3 attached terminal deoxyabasic moeity
  misc_feature (5)..(5): 2'-deoxy-2'-fluoro
  misc_feature (6)..(19): 2'-deoxy
  misc_feature (20)..(21): n stands for thymidine
  misc_feature (21)..(21): 3'-3 attached terminal deoxyabasic moeity
gaagcagagagagagaaggnn

SEQ ID NO: 3607 - RNA, 21 nt, Artificial Sequence
  Description of Artificial Sequence:  siNA sense region
  misc_feature (1)..(7): 2'-deoxy
  misc_feature (1)..(1): 5'-3 attached terminal deoxyabasic moeity
  misc_feature (8)..(9): 2'-deoxy-2'-fluoro
  misc_feature (10)..(16): 2'-deoxy
  misc_feature (17)..(17): 2'-deoxy-2'-fluoro
  misc_feature (18)..(19): 2'-deoxy
  misc_feature (20)..(21): n stands for thymidine
  misc_feature (21)..(21): 3'-3 attached terminal deoxyabasic moeity
agaggaaccaggaggacaann

SEQ ID NO: 3608 - RNA, 21 nt, Artificial Sequence
  Description of Artificial Sequence:  siNA sense region
  misc_feature (1)..(1): 2'-deoxy-2'-fluoro
  misc_feature (1)..(1): 5'-3 attached terminal deoxyabasic moeity
  misc_feature (2)..(9): 2'-deoxy
  misc_feature (10)..(10): 2'-deoxy-2'-fluoro
  misc_feature (11)..(11): 2'-deoxy
  misc_feature (12)..(12): 2'-deoxy-2'-fluoro
  misc_feature (13)..(17): 2'-deoxy
  misc_feature (18)..(18): 2'-deoxy-2'-fluoro
  misc_feature (19)..(19): 2'-deoxy
  misc_feature (20)..(21): n stands for thymidine
  misc_feature (21)..(21): 3'-3 attached terminal deoxyabasic moeity
caagaggagcaugaaagugnn

SEQ ID NO: 3609 - RNA, 21 nt, Artificial Sequence
  Description of Artificial Sequence:  siNA antisense region
  misc_feature (1)..(2): 2'-deoxy
  misc_feature (3)..(3): 2'-deoxy-2'-fluoro
  misc_feature (4)..(4): 2'-deoxy
  misc_feature (5)..(10): 2'-deoxy-2'-fluoro
  misc_feature (11)..(11): 2'-deoxy
  misc_feature (12)..(12): 2'-deoxy-2'-fluoro
  misc_feature (13)..(14): 2'-deoxy
  misc_feature (15)..(15): 2'-deoxy-2'-fluoro
  misc_feature (16)..(17): 2'-deoxy
  misc_feature (18)..(18): 2'-deoxy-2'-fluoro
  misc_feature (19)..(19): 2'-deoxy
  misc_feature (20)..(21): n stands for thymidine
  misc_feature (20)..(20): Phosphorothioate 3'-Internucleotide Linkage
gguacuucuuguggcagugnn

SEQ ID NO: 3610 - RNA, 21 nt, Artificial Sequence
  Description of Artificial Sequence:  siNA antisense region
  misc_feature (1)..(14): 2'-deoxy-2'-fluoro
  misc_feature (15)..(15): 2'-deoxy
  misc_feature (16)..(19): 2'-deoxy-2'-fluoro
  misc_feature (20)..(21): n stands for thymidine
  misc_feature (20)..(20): Phosphorothioate 3'-Internucleotide Linkage
ccuucucucucucugcuucnn

SEQ ID NO: 3611 - RNA, 21 nt, Artificial Sequence
  Description of Artificial Sequence:  siNA antisense region
  misc_feature (1)..(2): 2'-deoxy-2'-fluoro
  misc_feature (3)..(3): 2'-deoxy
  misc_feature (4)..(10): 2'-deoxy-2'-fluoro
  misc_feature (11)..(12): 2'-deoxy
  misc_feature (13)..(19): 2'-deoxy-2'-fluoro
  misc_feature (20)..(21): n stands for thymidine
  misc_feature (20)..(20): Phosphorothioate 3'-Internucleotide Linkage
uuguccuccugguuccucunn

SEQ ID NO: 3612 - RNA, 21 nt, Artificial Sequence
  Description of Artificial Sequence:  siNA antisense region
  misc_feature (1)..(1): 2'-deoxy-2'-fluoro
  misc_feature (2)..(2): 2'-deoxy
  misc_feature (3)..(7): 2'-deoxy-2'-fluoro
  misc_feature (8)..(8): 2'-deoxy
  misc_feature (9)..(9): 2'-deoxy-2'-fluoro
  misc_feature (10)..(10): 2'-deoxy
  misc_feature (11)..(18): 2'-deoxy-2'-fluoro
  misc_feature (19)..(19): 2'-deoxy
  misc_feature (20)..(21): n stands for thymidine
  misc_feature (20)..(20): Phosphorothioate 3'-Internucleotide Linkage
cacuuucaugcuccucuugnn

SEQ ID NO: 3613 - RNA, 21 nt, Artificial Sequence
  Description of Artificial Sequence:  siNA sense region
  misc_feature (20)..(21): n stands for thymidine
uucuaugugaccaccauccnn

SEQ ID NO: 3614 - RNA, 21 nt, Artificial Sequence
  Description of Artificial Sequence:  siNA sense region
  misc_feature (20)..(21): n stands for thymidine
agcacugccacaagaaguann

SEQ ID NO: 3615 - RNA, 21 nt, Artificial Sequence
  Description of Artificial Sequence:  siNA sense region
  misc_feature (20)..(21): n stands for thymidine
uacggcaaccucuccaacunn

SEQ ID NO: 3616 - RNA, 21 nt, Artificial Sequence
  Description of Artificial Sequence:  siNA antisense region
  misc_feature (20)..(21): n stands for thymidine
ggaugguggucacauagaann

SEQ ID NO: 3617 - RNA, 21 nt, Artificial Sequence
  Description of Artificial Sequence:  siNA antisense region
  misc_feature (20)..(21): n stands for thymidine
uacuucuuguggcagugcunn

SEQ ID NO: 3618 - RNA, 21 nt, Artificial Sequence
  Description of Artificial Sequence:  siNA antisense region
  misc_feature (20)..(21): n stands for thymidine
aguuggagagguugccguann

SEQ ID NO: 3619 - RNA, 21 nt, Artificial Sequence
  Description of Artificial Sequence:  siNA sense region
  misc_feature (1)..(1): 5'-3 attached terminal deoxyabasic moeity
  misc_feature (21)..(21): 3'-3 attached terminal deoxyabasic moeity
  misc_feature (20)..(21): n stands for thymidine
gccauguacaaguguguggnn

SEQ ID NO: 3620 - RNA, 21 nt, Artificial Sequence
  Description of Artificial Sequence:  siNA sense region
  misc_feature (1)..(1): 5'-3 attached terminal deoxyabasic moeity
  misc_feature (21)..(21): 3'-3 attached terminal deoxyabasic moeity
  misc_feature (20)..(21): n stands for thymidine
uucuaugugaccaccauccnn

SEQ ID NO: 3621 - RNA, 21 nt, Artificial Sequence
  Description of Artificial Sequence:  siNA sense region
  misc_feature (1)..(1): 5'-3 attached terminal deoxyabasic moeity
  misc_feature (21)..(21): 3'-3 attached terminal deoxyabasic moeity
  misc_feature (20)..(21): n stands for thymidine
agcacugccacaagaaguann

SEQ ID NO: 3622 - RNA, 21 nt, Artificial Sequence
  Description of Artificial Sequence:  siNA sense region
  misc_feature (1)..(1): 5'-3 attached terminal deoxyabasic moeity
  misc_feature (21)..(21): 3'-3 attached terminal deoxyabasic moeity
  misc_feature (20)..(21): n stands for thymidine
cacugccacaagaaguaccnn

SEQ ID NO: 3623 - RNA, 21 nt, Artificial Sequence
  Description of Artificial Sequence:  siNA sense region
  misc_feature (1)..(1): 5'-3 attached terminal deoxyabasic moeity
  misc_feature (21)..(21): 3'-3 attached terminal deoxyabasic moeity
  misc_feature (20)..(21): n stands for thymidine
ugccacaagaaguaccugunn

SEQ ID NO: 3624 - RNA, 21 nt, Artificial Sequence
  Description of Artificial Sequence:  siNA sense region
  misc_feature (1)..(1): 5'-3 attached terminal deoxyabasic moeity
  misc_feature (21)..(21): 3'-3 attached terminal deoxyabasic moeity
  misc_feature (20)..(21): n stands for thymidine
uacggcaaccucuccaacunn

SEQ ID NO: 3625 - RNA, 21 nt, Artificial Sequence
  Description of Artificial Sequence:  siNA sense region
  misc_feature (1)..(1): 5'-3 attached terminal deoxyabasic moeity
  misc_feature (21)..(21): 3'-3 attached terminal deoxyabasic moeity
  misc_feature (20)..(21): n stands for thymidine
gugaagaucugugacuuugnn

SEQ ID NO: 3626 - RNA, 21 nt, Artificial Sequence
  Description of Artificial Sequence:  siNA sense region
  misc_feature (1)..(1): 5'-3 attached terminal deoxyabasic moeity
  misc_feature (21)..(21): 3'-3 attached terminal deoxyabasic moeity
  misc_feature (20)..(21): n stands for thymidine
agaucugugacuuuggccunn

SEQ ID NO: 3627 - RNA, 21 nt, Artificial Sequence
  Description of Artificial Sequence:  siNA antisense region
  misc_feature (20)..(20): Phosphorothioate 3'-Internucleotide Linkage
  misc_feature (20)..(21): n stands for thymidine
ccacacacuuguacauggcnn

SEQ ID NO: 3628 - RNA, 21 nt, Artificial Sequence
  Description of Artificial Sequence:  siNA antisense region
  misc_feature (20)..(20): Phosphorothioate 3'-Internucleotide Linkage
  misc_feature (20)..(21): n stands for thymidine
ggaugguggucacauagaann

SEQ ID NO: 3629 - RNA, 21 nt, Artificial Sequence
  Description of Artificial Sequence:  siNA antisense region
  misc_feature (20)..(20): Phosphorothioate 3'-Internucleotide Linkage
  misc_feature (20)..(21): n stands for thymidine
uacuucuuguggcagugcunn

SEQ ID NO: 3630 - RNA, 21 nt, Artificial Sequence
  Description of Artificial Sequence:  siNA antisense region
  misc_feature (20)..(20): Phosphorothioate 3'-Internucleotide Linkage
  misc_feature (20)..(21): n stands for thymidine
gguacuucuuguggcagugnn

SEQ ID NO: 3631 - RNA, 21 nt, Artificial Sequence
  Description of Artificial Sequence:  siNA antisense region
  misc_feature (20)..(20): Phosphorothioate 3'-Internucleotide Linkage
  misc_feature (20)..(21): n stands for thymidine
acagguacuucuuguggcann

SEQ ID NO: 3632 - RNA, 21 nt, Artificial Sequence
  Description of Artificial Sequence:  siNA antisense region
  misc_feature (20)..(20): Phosphorothioate 3'-Internucleotide Linkage
  misc_feature (20)..(21): n stands for thymidine
aguuggagagguugccguann

SEQ ID NO: 3633 - RNA, 21 nt, Artificial Sequence
  Description of Artificial Sequence:  siNA antisense region
  misc_feature (20)..(20): Phosphorothioate 3'-Internucleotide Linkage
  misc_feature (20)..(21): n stands for thymidine
caaagucacagaucuucacnn

SEQ ID NO: 3634 - RNA, 21 nt, Artificial Sequence
  Description of Artificial Sequence:  siNA antisense region
  misc_feature (20)..(20): Phosphorothioate 3'-Internucleotide Linkage
  misc_feature (20)..(21): n stands for thymidine
aggccaaagucacagaucunn

SEQ ID NO: 3635 - RNA, 21 nt, Artificial Sequence
  Description of Artificial Sequence:  siNA antisense region
  misc_feature (1)..(2): 2'-deoxy-2'-fluoro
  misc_feature (3)..(3): 2'-O-methyl
  misc_feature (4)..(4): 2'-deoxy-2'-fluoro
  misc_feature (5)..(5): 2'-O-methyl
  misc_feature (6)..(6): 2'-deoxy-2'-fluoro
  misc_feature (7)..(7): 2'-O-methyl
  misc_feature (8)..(10): 2'-deoxy-2'-fluoro
  misc_feature (11)..(11): 2'-O-methyl
  misc_feature (12)..(12): 2'-deoxy-2'-fluoro
  misc_feature (13)..(13): 2'-O-methyl
  misc_feature (14)..(14): 2'-deoxy-2'-fluoro
  misc_feature (15)..(15): 2'-O-methyl
  misc_feature (16)..(16): 2'-deoxy-2'-fluoro
  misc_feature (17)..(18): 2'-O-methyl
  misc_feature (19)..(19): 2'-deoxy-2'-fluoro
  misc_feature (20)..(21): n stands for thymidine
  misc_feature (20)..(20): Phosphorothioate 3'-Internucleotide Linkage
ccacacacuuguacauggcnn

SEQ ID NO: 3636 - RNA, 21 nt, Artificial Sequence
  Description of Artificial Sequence:  siNA antisense region
  misc_feature (1)..(3): 2'-O-methyl
  misc_feature (4)..(4): 2'-deoxy-2'-fluoro
  misc_feature (5)..(6): 2'-O-methyl
  misc_feature (7)..(7): 2'-deoxy-2'-fluoro
  misc_feature (8)..(9): 2'-O-methyl
  misc_feature (10)..(11): 2'-deoxy-2'-fluoro
  misc_feature (12)..(12): 2'-O-methyl
  misc_feature (13)..(13): 2'-deoxy-2'-fluoro
  misc_feature (14)..(14): 2'-O-methyl
  misc_feature (15)..(15): 2'-deoxy-2'-fluoro
  misc_feature (16)..(19): 2'-O-methyl
  misc_feature (20)..(21): n stands for thymidine
  misc_feature (20)..(20): Phosphorothioate 3'-Internucleotide Linkage
ggaugguggucacauagaann

SEQ ID NO: 3637 - RNA, 21 nt, Artificial Sequence
  Description of Artificial Sequence:  siNA antisense region
  misc_feature (1)..(1): 2'-deoxy-2'-fluoro
  misc_feature (2)..(2): 2'-O-methyl
  misc_feature (3)..(8): 2'-deoxy-2'-fluoro
  misc_feature (9)..(9): 2'-O-methyl
  misc_feature (10)..(10): 2'-deoxy-2'-fluoro
  misc_feature (11)..(12): 2'-O-methyl
  misc_feature (13)..(13): 2'-deoxy-2'-fluoro
  misc_feature (14)..(15): 2'-O-methyl
  misc_feature (16)..(16): 2'-deoxy-2'-fluoro
  misc_feature (17)..(17): 2'-O-methyl
  misc_feature (18)..(19): 2'-deoxy-2'-fluoro
  misc_feature (20)..(21): n stands for thymidine
  misc_feature (20)..(20): Phosphorothioate 3'-Internucleotide Linkage
uacuucuuguggcagugcunn

SEQ ID NO: 3638 - RNA, 21 nt, Artificial Sequence
  Description of Artificial Sequence:  siNA antisense region
  misc_feature (1)..(2): 2'-O-methyl
  misc_feature (3)..(3): 2'-deoxy-2'-fluoro
  misc_feature (4)..(4): 2'-O-methyl
  misc_feature (5)..(10): 2'-deoxy-2'-fluoro
  misc_feature (11)..(11): 2'-O-methyl
  misc_feature (12)..(12): 2'-deoxy-2'-fluoro
  misc_feature (13)..(14): 2'-O-methyl
  misc_feature (15)..(15): 2'-deoxy-2'-fluoro
  misc_feature (16)..(17): 2'-O-methyl
  misc_feature (18)..(18): 2'-deoxy-2'-fluoro
  misc_feature (19)..(19): 2'-O-methyl
  misc_feature (20)..(21): n stands for thymidine
  misc_feature (20)..(20): Phosphorothioate 3'-Internucleotide Linkage
gguacuucuuguggcagugnn

SEQ ID NO: 3639 - RNA, 21 nt, Artificial Sequence
  Description of Artificial Sequence:  siNA antisense region
  misc_feature (1)..(1): 2'-O-methyl
  misc_feature (2)..(2): 2'-deoxy-2'-fluoro
  misc_feature (3)..(5): 2'-O-methyl
  misc_feature (6)..(6): 2'-deoxy-2'-fluoro
  misc_feature (7)..(7): 2'-O-methyl
  misc_feature (8)..(13): 2'-deoxy-2'-fluoro
  misc_feature (14)..(14): 2'-O-methyl
  misc_feature (15)..(15): 2'-deoxy-2'-fluoro
  misc_feature (16)..(17): 2'-O-methyl
  misc_feature (18)..(18): 2'-deoxy-2'-fluoro
  misc_feature (19)..(19): 2'-O-methyl
  misc_feature (20)..(21): n stands for thymidine
  misc_feature (20)..(20): Phosphorothioate 3'-Internucleotide Linkage
acagguacuucuuguggcann

SEQ ID NO: 3640 - RNA, 21 nt, Artificial Sequence
  Description of Artificial Sequence:  siNA antisense region
  misc_feature (1)..(2): 2'-O-methyl
  misc_feature (3)..(4): 2'-deoxy-2'-fluoro
  misc_feature (5)..(11): 2'-O-methyl
  misc_feature (12)..(13): 2'-deoxy-2'-fluoro
  misc_feature (14)..(14): 2'-O-methyl
  misc_feature (15)..(16): 2'-deoxy-2'-fluoro
  misc_feature (17)..(17): 2'-O-methyl
  misc_feature (18)..(18): 2'-deoxy-2'-fluoro
  misc_feature (19)..(19): 2'-O-methyl
  misc_feature (20)..(21): n stands for thymidine
  misc_feature (20)..(20): Phosphorothioate 3'-Internucleotide Linkage
aguuggagagguugccguann

SEQ ID NO: 3641 - RNA, 21 nt, Artificial Sequence
  Description of Artificial Sequence:  siNA sense region
  misc_feature (1)..(1): 2'-deoxy-2'-fluoro
  misc_feature (2)..(5): 2'-O-methyl
  misc_feature (6)..(7): 2'-deoxy-2'-fluoro
  misc_feature (8)..(8): 2'-O-methyl
  misc_feature (9)..(9): 2'-deoxy-2'-fluoro
  misc_feature (10)..(12): 2'-O-methyl
  misc_feature (13)..(17): 2'-deoxy-2'-fluoro
  misc_feature (18)..(18): 2'-O-methyl
  misc_feature (19)..(19): 2'-deoxy-2'-fluoro
  misc_feature (20)..(20): Phosphorothioate 3'-Internucleotide Linkage
  misc_feature (20)..(21): n stands for thymidine
caaagucacagaucuucacnn

SEQ ID NO: 3642 - RNA, 21 nt, Artificial Sequence
  Description of Artificial Sequence:  siNA antisense region
  misc_feature (1)..(3): 2'-O-methyl
  misc_feature (4)..(5): 2'-deoxy-2'-fluoro
  misc_feature (6)..(9): 2'-O-methyl
  misc_feature (10)..(11): 2'-deoxy-2'-fluoro
  misc_feature (12)..(12): 2'-O-methyl
  misc_feature (13)..(13): 2'-deoxy-2'-fluoro
  misc_feature (14)..(16): 2'-O-methyl
  misc_feature (17)..(19): 2'-deoxy-2'-fluoro
  misc_feature (20)..(21): n stands for thymidine
  misc_feature (20)..(20): Phosphorothioate 3'-Internucleotide Linkage
aggccaaagucacagaucunn

SEQ ID NO: 3643 - RNA, 21 nt, Artificial Sequence
  Description of Artificial Sequence:  siNA sense region
  misc_feature (20)..(21): n stands for thymidine
aagagcuccagagagaagunn

SEQ ID NO: 3644 - RNA, 21 nt, Artificial Sequence
  Description of Artificial Sequence:  siNA sense region
  misc_feature (20)..(21): n stands for thymidine
aagugagugaccugcuuuunn

SEQ ID NO: 3645 - RNA, 21 nt, Artificial Sequence
  Description of Artificial Sequence:  siNA sense region
  misc_feature (20)..(21): n stands for thymidine
gaaguggugaaguucauggnn

SEQ ID NO: 3646 - RNA, 21 nt, Artificial Sequence
  Description of Artificial Sequence:  siNA sense region
  misc_feature (20)..(21): n stands for thymidine
uggacaucuuccaggaguann

SEQ ID NO: 3647 - RNA, 21 nt, Artificial Sequence
  Description of Artificial Sequence:  siNA sense region
  misc_feature (20)..(21): n stands for thymidine
ggacaucuuccaggaguacnn

SEQ ID NO: 3648 - RNA, 21 nt, Artificial Sequence
  Description of Artificial Sequence:  siNA sense region
  misc_feature (20)..(21): n stands for thymidine
acaucuuccaggaguacccnn

SEQ ID NO: 3649 - RNA, 21 nt, Artificial Sequence
  Description of Artificial Sequence:  siNA sense region
  misc_feature (20)..(21): n stands for thymidine
uccaacaucaccaugcagann

SEQ ID NO: 3650 - RNA, 21 nt, Artificial Sequence
  Description of Artificial Sequence:  siNA sense region
  misc_feature (20)..(21): n stands for thymidine
aacguacuugcagaugugann

SEQ ID NO: 3651 - RNA, 21 nt, Artificial Sequence
  Description of Artificial Sequence:  siNA antisense region
  misc_feature (20)..(21): n stands for thymidine
acuucucucuggagcucuunn

SEQ ID NO: 3652 - RNA, 21 nt, Artificial Sequence
  Description of Artificial Sequence:  siNA antisense region
  misc_feature (20)..(21): n stands for thymidine
aaaagcaggucacucacuunn

SEQ ID NO: 3653 - RNA, 21 nt, Artificial Sequence
  Description of Artificial Sequence:  siNA antisense region
  misc_feature (20)..(21): n stands for thymidine
ccaugaacuucaccacuucnn

SEQ ID NO: 3654 - RNA, 21 nt, Artificial Sequence
  Description of Artificial Sequence:  siNA antisense region
  misc_feature (20)..(21): n stands for thymidine
uacuccuggaagauguccann

SEQ ID NO: 3655 - RNA, 21 nt, Artificial Sequence
  Description of Artificial Sequence:  siNA antisense region
  misc_feature (20)..(21): n stands for thymidine
guacuccuggaagauguccnn

SEQ ID NO: 3656 - RNA, 21 nt, Artificial Sequence
  Description of Artificial Sequence:  siNA antisense region
  misc_feature (20)..(21): n stands for thymidine
ggguacuccuggaagaugunn

SEQ ID NO: 3657 - RNA, 21 nt, Artificial Sequence
  Description of Artificial Sequence:  siNA antisense region
  misc_feature (20)..(21): n stands for thymidine
ucugcauggugauguuggann

SEQ ID NO: 3658 - RNA, 21 nt, Artificial Sequence
  Description of Artificial Sequence:  siNA antisense region
  misc_feature (20)..(21): n stands for thymidine
ucacaucugcaaguacguunn

SEQ ID NO: 3659 - RNA, 21 nt, Artificial Sequence
  Description of Artificial Sequence:  siNA sense region
  misc_feature (1)..(1): 5'-3 attached terminal deoxyabasic moeity
  misc_feature (6)..(9): 2'-deoxy-2'-fluoro
  misc_feature (19)..(19): 2'-deoxy-2'-fluoro
  misc_feature (20)..(20): n stands for thymidine
  misc_feature (21)..(21): 3'-3 attached terminal deoxyabasic moeity
aagagcuccagagagaagunn

SEQ ID NO: 3660 - RNA, 21 nt, Artificial Sequence
  Description of Artificial Sequence:  siNA sense region
  misc_feature (1)..(1): 5'-3 attached terminal deoxyabasic moeity
  misc_feature (4)..(4): 2'-deoxy-2'-fluoro
  misc_feature (8)..(8): 2'-deoxy-2'-fluoro
  misc_feature (11)..(13): 2'-deoxy-2'-fluoro
  misc_feature (15)..(19): 2'-deoxy-2'-fluoro
  misc_feature (20)..(20): n stands for thymidine
  misc_feature (21)..(21): 3'-3 attached terminal deoxyabasic moeity
aagugagugaccugcuuuunn

SEQ ID NO: 3661 - RNA, 21 nt, Artificial Sequence
  Description of Artificial Sequence:  siNA sense region
  misc_feature (1)..(1): 5'-3 attached terminal deoxyabasic moeity
  misc_feature (5)..(5): 2'-deoxy-2'-fluoro
  misc_feature (8)..(8): 2'-deoxy-2'-fluoro
  misc_feature (13)..(15): 2'-deoxy-2'-fluoro
  misc_feature (17)..(17): 2'-deoxy-2'-fluoro
  misc_feature (20)..(20): n stands for thymidine
  misc_feature (21)..(21): 3'-3 attached terminal deoxyabasic moeity
gaaguggugaaguucauggnn

SEQ ID NO: 3662 - RNA, 21 nt, Artificial Sequence
  Description of Artificial Sequence:  siNA sense region
  misc_feature (1)..(1): 2'-deoxy-2'-fluoro
  misc_feature (1)..(1): 5'-3 attached terminal deoxyabasic moeity
  misc_feature (5)..(5): 2'-deoxy-2'-fluoro
  misc_feature (7)..(12): 2'-deoxy-2'-fluoro
  misc_feature (18)..(18): 2'-deoxy-2'-fluoro
  misc_feature (20)..(20): n stands for thymidine
  misc_feature (21)..(21): 3'-3 attached terminal deoxyabasic moeity
uggacaucuuccaggaguann

SEQ ID NO: 3663 - RNA, 21 nt, Artificial Sequence
  Description of Artificial Sequence:  siNA sense region
  misc_feature (1)..(1): 5'-3 attached terminal deoxyabasic moeity
  misc_feature (4)..(4): 2'-deoxy-2'-fluoro
  misc_feature (6)..(11): 2'-deoxy-2'-fluoro
  misc_feature (17)..(17): 2'-deoxy-2'-fluoro
  misc_feature (19)..(19): 2'-deoxy-2'-fluoro
  misc_feature (20)..(20): n stands for thymidine
  misc_feature (21)..(21): 3'-3 attached terminal deoxyabasic moeity
ggacaucuuccaggaguacnn

SEQ ID NO: 3664 - RNA, 21 nt, Artificial Sequence
  Description of Artificial Sequence:  siNA sense region
  misc_feature (1)..(1): 5'-3 attached terminal deoxyabasic moeity
  misc_feature (2)..(2): 2'-deoxy-2'-fluoro
  misc_feature (4)..(9): 2'-deoxy-2'-fluoro
  misc_feature (15)..(15): 2'-deoxy-2'-fluoro
  misc_feature (17)..(19): 2'-deoxy-2'-fluoro
  misc_feature (20)..(20): n stands for thymidine
  misc_feature (21)..(21): 3'-3 attached terminal deoxyabasic moeity
acaucuuccaggaguacccnn

SEQ ID NO: 3665 - RNA, 21 nt, Artificial Sequence
  Description of Artificial Sequence:  siNA sense region
  misc_feature (1)..(1): 5'-3 attached terminal deoxyabasic moeity
  misc_feature (1)..(3): 2'-deoxy-2'-fluoro
  misc_feature (6)..(6): 2'-deoxy-2'-fluoro
  misc_feature (8)..(9): 2'-deoxy-2'-fluoro
  misc_feature (11)..(12): 2'-deoxy-2'-fluoro
  misc_feature (14)..(14): 2'-deoxy-2'-fluoro
  misc_feature (16)..(16): 2'-deoxy-2'-fluoro
  misc_feature (20)..(20): n stands for thymidine
  misc_feature (21)..(21): 3'-3 attached terminal deoxyabasic moeity
uccaacaucaccaugcagann

SEQ ID NO: 3666 - RNA, 21 nt, Artificial Sequence
  Description of Artificial Sequence:  siNA sense region
  misc_feature (1)..(1): 5'-3 attached terminal deoxyabasic moeity
  misc_feature (3)..(3): 2'-deoxy-2'-fluoro
  misc_feature (5)..(5): 2'-deoxy-2'-fluoro
  misc_feature (7)..(9): 2'-deoxy-2'-fluoro
  misc_feature (11)..(11): 2'-deoxy-2'-fluoro
  misc_feature (15)..(15): 2'-deoxy-2'-fluoro
  misc_feature (17)..(17): 2'-deoxy-2'-fluoro
  misc_feature (20)..(20): n stands for thymidine
  misc_feature (21)..(21): 3'-3 attached terminal deoxyabasic moeity
aacguacuugcagaugugann

SEQ ID NO: 3667 - RNA, 21 nt, Artificial Sequence
  Description of Artificial Sequence:  siNA antisense region
  misc_feature (2)..(10): 2'-deoxy-2'-fluoro
  misc_feature (15)..(19): 2'-deoxy-2'-fluoro
  misc_feature (20)..(20): Phosphorothioate 3'-Internucleotide Linkage
  misc_feature (21)..(21): n stands for thymidine
acuucucucuggagcucuunn

SEQ ID NO: 3668 - RNA, 21 nt, Artificial Sequence
  Description of Artificial Sequence:  siNA antisense region
  misc_feature (6)..(6): 2'-deoxy-2'-fluoro
  misc_feature (10)..(11): 2'-deoxy-2'-fluoro
  misc_feature (13)..(15): 2'-deoxy-2'-fluoro
  misc_feature (17)..(19): 2'-deoxy-2'-fluoro
  misc_feature (20)..(20): Phosphorothioate 3'-Internucleotide Linkage
  misc_feature (21)..(21): n stands for thymidine
aaaagcaggucacucacuunn

SEQ ID NO: 3669 - RNA, 21 nt, Artificial Sequence
  Description of Artificial Sequence:  siNA antisense region
  misc_feature (1)..(2): 2'-deoxy-2'-fluoro
  misc_feature (4)..(4): 2'-deoxy-2'-fluoro
  misc_feature (8)..(11): 2'-deoxy-2'-fluoro
  misc_feature (13)..(14): 2'-deoxy-2'-fluoro
  misc_feature (16)..(19): 2'-deoxy-2'-fluoro
  misc_feature (20)..(20): Phosphorothioate 3'-Internucleotide Linkage
  misc_feature (21)..(21): n stands for thymidine
ccaugaacuucaccacuucnn

SEQ ID NO: 3670 - RNA, 21 nt, Artificial Sequence
  Description of Artificial Sequence:  siNA antisense region
  misc_feature (1)..(1): 2'-deoxy-2'-fluoro
  misc_feature (3)..(7): 2'-deoxy-2'-fluoro
  misc_feature (14)..(14): 2'-deoxy-2'-fluoro
  misc_feature (16)..(18): 2'-deoxy-2'-fluoro
  misc_feature (20)..(20): Phosphorothioate 3'-Internucleotide Linkage
  misc_feature (21)..(21): n stands for thymidine
uacuccuggaagauguccann

SEQ ID NO: 3671 - RNA, 21 nt, Artificial Sequence
  Description of Artificial Sequence:  siNA antisense region
  misc_feature (2)..(2): 2'-deoxy-2'-fluoro
  misc_feature (4)..(8): 2'-deoxy-2'-fluoro
  misc_feature (15)..(15): 2'-deoxy-2'-fluoro
  misc_feature (17)..(19): 2'-deoxy-2'-fluoro
  misc_feature (20)..(20): Phosphorothioate 3'-Internucleotide Linkage
  misc_feature (21)..(21): n stands for thymidine
guacuccuggaagauguccnn

SEQ ID NO: 3672 - RNA, 21 nt, Artificial Sequence
  Description of Artificial Sequence:  siNA antisense region
  misc_feature (4)..(4): 2'-deoxy-2'-fluoro
  misc_feature (6)..(10): 2'-deoxy-2'-fluoro
  misc_feature (17)..(17): 2'-deoxy-2'-fluoro
  misc_feature (19)..(19): 2'-deoxy-2'-fluoro
  misc_feature (20)..(20): Phosphorothioate 3'-Internucleotide Linkage
  misc_feature (21)..(21): n stands for thymidine
ggguacuccuggaagaugunn

SEQ ID NO: 3673 - RNA, 21 nt, Artificial Sequence
  Description of Artificial Sequence:  siNA antisense region
  misc_feature (1)..(3): 2'-deoxy-2'-fluoro
  misc_feature (5)..(5): 2'-deoxy-2'-fluoro
  misc_feature (7)..(7): 2'-deoxy-2'-fluoro
  misc_feature (10)..(10): 2'-deoxy-2'-fluoro
  misc_feature (13)..(13): 2'-deoxy-2'-fluoro
  misc_feature (15)..(16): 2'-deoxy-2'-fluoro
  misc_feature (20)..(20): Phosphorothioate 3'-Internucleotide Linkage
  misc_feature (21)..(21): n stands for thymidine
ucugcauggugauguuggann

SEQ ID NO: 3674 - RNA, 21 nt, Artificial Sequence
  Description of Artificial Sequence:  siNA antisense region
  misc_feature (1)..(2): 2'-deoxy-2'-fluoro
  misc_feature (4)..(4): 2'-deoxy-2'-fluoro
  misc_feature (6)..(8): 2'-deoxy-2'-fluoro
  misc_feature (10)..(10): 2'-deoxy-2'-fluoro
  misc_feature (14)..(14): 2'-deoxy-2'-fluoro
  misc_feature (16)..(16): 2'-deoxy-2'-fluoro
  misc_feature (18)..(19): 2'-deoxy-2'-fluoro
  misc_feature (20)..(20): Phosphorothioate 3'-Internucleotide Linkage
  misc_feature (21)..(21): n stands for thymidine
ucacaucugcaaguacguunn

SEQ ID NO: 3675 - RNA, 21 nt, Artificial Sequence
  Description of Artificial Sequence:  siNA sense region
  misc_feature (1)..(1): 5'-3 attached terminal deoxyabasic moeity
  misc_feature (1)..(5): 2'-deoxy
  misc_feature (6)..(9): 2'-deoxy-2'-fluoro
  misc_feature (10)..(18): 2'-deoxy
  misc_feature (19)..(19): 2'-deoxy-2'-fluoro
  misc_feature (20)..(20): n stands for thymidine
  misc_feature (21)..(21): 3'-3 attached terminal deoxyabasic moeity
aagagcuccagagagaagunn

SEQ ID NO: 3676 - RNA, 21 nt, Artificial Sequence
  Description of Artificial Sequence:  siNA sense region
  misc_feature (1)..(3): 2'-deoxy
  misc_feature (1)..(1): 5'-3 attached terminal deoxyabasic moeity
  misc_feature (4)..(4): 2'-deoxy-2'-fluoro
  misc_feature (5)..(7): 2'-deoxy
  misc_feature (8)..(8): 2'-deoxy-2'-fluoro
  misc_feature (9)..(10): 2'-deoxy
  misc_feature (11)..(13): 2'-deoxy-2'-fluoro
  misc_feature (14)..(14): 2'-deoxy
  misc_feature (15)..(19): 2'-deoxy-2'-fluoro
  misc_feature (20)..(20): n stands for thymidine
  misc_feature (21)..(21): 3'-3 attached terminal deoxyabasic moeity
aagugagugaccugcuuuunn

SEQ ID NO: 3677 - RNA, 21 nt, Artificial Sequence
  Description of Artificial Sequence:  siNA sense region
  misc_feature (1)..(1): 5'-3 attached terminal deoxyabasic moeity
  misc_feature (1)..(4): 2'-deoxy
  misc_feature (5)..(5): 2'-deoxy-2'-fluoro
  misc_feature (6)..(7): 2'-deoxy
  misc_feature (8)..(8): 2'-deoxy-2'-fluoro
  misc_feature (9)..(12): 2'-deoxy
  misc_feature (13)..(15): 2'-deoxy-2'-fluoro
  misc_feature (16)..(16): 2'-deoxy
  misc_feature (17)..(17): 2'-deoxy-2'-fluoro
  misc_feature (18)..(19): 2'-deoxy
  misc_feature (20)..(20): n stands for thymidine
  misc_feature (21)..(21): 3'-3 attached terminal deoxyabasic moeity
gaaguggugaaguucauggnn

SEQ ID NO: 3678 - RNA, 21 nt, Artificial Sequence
  Description of Artificial Sequence:  siNA sense region
  misc_feature (1)..(1): 2'-deoxy-2'-fluoro
  misc_feature (1)..(1): 5'-3 attached terminal deoxyabasic moeity
  misc_feature (2)..(4): 2'-deoxy
  misc_feature (5)..(5): 2'-deoxy-2'-fluoro
  misc_feature (6)..(6): 2'-deoxy
  misc_feature (7)..(12): 2'-deoxy-2'-fluoro
  misc_feature (13)..(17): 2'-deoxy
  misc_feature (18)..(18): 2'-deoxy-2'-fluoro
  misc_feature (19)..(19): 2'-deoxy
  misc_feature (20)..(20): n stands for thymidine
  misc_feature (21)..(21): 3'-3 attached terminal deoxyabasic moeity
uggacaucuuccaggaguann

SEQ ID NO: 3679 - RNA, 21 nt, Artificial Sequence
  Description of Artificial Sequence:  siNA sense region
  misc_feature (1)..(1): 5'-3 attached terminal deoxyabasic moeity
  misc_feature (1)..(3): 2'-deoxy
  misc_feature (4)..(4): 2'-deoxy-2'-fluoro
  misc_feature (5)..(5): 2'-deoxy
  misc_feature (6)..(11): 2'-deoxy-2'-fluoro
  misc_feature (12)..(16): 2'-deoxy
  misc_feature (17)..(17): 2'-deoxy-2'-fluoro
  misc_feature (18)..(18): 2'-deoxy
  misc_feature (19)..(19): 2'-deoxy-2'-fluoro
  misc_feature (20)..(20): n stands for thymidine
  misc_feature (21)..(21): 3'-3 attached terminal deoxyabasic moeity
ggacaucuuccaggaguacnn

SEQ ID NO: 3680 - RNA, 21 nt, Artificial Sequence
  Description of Artificial Sequence:  siNA sense region
  misc_feature (1)..(1): 2'-deoxy
  misc_feature (1)..(1): 5'-3 attached terminal deoxyabasic moeity
  misc_feature (2)..(2): 2'-deoxy-2'-fluoro
  misc_feature (3)..(3): 2'-deoxy
  misc_feature (4)..(9): 2'-deoxy-2'-fluoro
  misc_feature (10)..(14): 2'-deoxy
  misc_feature (15)..(15): 2'-deoxy-2'-fluoro
  misc_feature (16)..(16): 2'-deoxy
  misc_feature (17)..(19): 2'-deoxy-2'-fluoro
  misc_feature (20)..(20): n stands for thymidine
  misc_feature (21)..(21): 3'-3 attached terminal deoxyabasic moeity
acaucuuccaggaguacccnn

SEQ ID NO: 3681 - RNA, 21 nt, Artificial Sequence
  Description of Artificial Sequence:  siNA sense region
  misc_feature (1)..(1): 5'-3 attached terminal deoxyabasic moeity
  misc_feature (1)..(3): 2'-deoxy-2'-fluoro
  misc_feature (6)..(6): 2'-deoxy-2'-fluoro
  misc_feature (8)..(9): 2'-deoxy-2'-fluoro
  misc_feature (11)..(12): 2'-deoxy-2'-fluoro
  misc_feature (14)..(14): 2'-deoxy-2'-fluoro
  misc_feature (16)..(16): 2'-deoxy-2'-fluoro
  misc_feature (20)..(20): n stands for thymidine
  misc_feature (21)..(21): 3'-3 attached terminal deoxyabasic moeity
uccaacaucaccaugcagann

SEQ ID NO: 3682 - RNA, 21 nt, Artificial Sequence
  Description of Artificial Sequence:  siNA sense region
  misc_feature (1)..(2): 2'-deoxy
  misc_feature (1)..(1): 5'-3 attached terminal deoxyabasic moeity
  misc_feature (3)..(3): 2'-deoxy-2'-fluoro
  misc_feature (4)..(4): 2'-deoxy
  misc_feature (5)..(5): 2'-deoxy-2'-fluoro
  misc_feature (6)..(6): 2'-deoxy
  misc_feature (7)..(9): 2'-deoxy-2'-fluoro
  misc_feature (10)..(10): 2'-deoxy
  misc_feature (11)..(11): 2'-deoxy-2'-fluoro
  misc_feature (12)..(14): 2'-deoxy
  misc_feature (15)..(15): 2'-deoxy-2'-fluoro
  misc_feature (16)..(16): 2'-deoxy
  misc_feature (17)..(17): 2'-deoxy-2'-fluoro
  misc_feature (18)..(19): 2'-deoxy
  misc_feature (20)..(20): n stands for thymidine
  misc_feature (21)..(21): 3'-3 attached terminal deoxyabasic moeity
aacguacuugcagaugugann

SEQ ID NO: 3683 - RNA, 21 nt, Artificial Sequence
  Description of Artificial Sequence:  siNA antisense region
  misc_feature (1)..(1): 2'-deoxy
  misc_feature (2)..(10): 2'-deoxy-2'-fluoro
  misc_feature (11)..(14): 2'-deoxy
  misc_feature (15)..(19): 2'-deoxy-2'-fluoro
  misc_feature (20)..(20): Phosphorothioate 3'-Internucleotide Linkage
  misc_feature (21)..(21): n stands for thymidine
acuucucucuggagcucuunn

SEQ ID NO: 3684 - RNA, 21 nt, Artificial Sequence
  Description of Artificial Sequence:  siNA antisense region
  misc_feature (1)..(5): 2'-deoxy
  misc_feature (6)..(6): 2'-deoxy-2'-fluoro
  misc_feature (7)..(9): 2'-deoxy
  misc_feature (10)..(11): 2'-deoxy-2'-fluoro
  misc_feature (12)..(12): 2'-deoxy
  misc_feature (13)..(15): 2'-deoxy-2'-fluoro
  misc_feature (16)..(16): 2'-deoxy
  misc_feature (17)..(19): 2'-deoxy-2'-fluoro
  misc_feature (20)..(20): Phosphorothioate 3'-Internucleotide Linkage
  misc_feature (21)..(21): n stands for thymidine
aaaagcaggucacucacuunn

SEQ ID NO: 3685 - RNA, 21 nt, Artificial Sequence
  Description of Artificial Sequence:  siNA antisense region
  misc_feature (1)..(2): 2'-deoxy-2'-fluoro
  misc_feature (3)..(3): 2'-deoxy
  misc_feature (4)..(4): 2'-deoxy-2'-fluoro
  misc_feature (5)..(7): 2'-deoxy
  misc_feature (8)..(11): 2'-deoxy-2'-fluoro
  misc_feature (12)..(12): 2'-deoxy
  misc_feature (13)..(14): 2'-deoxy-2'-fluoro
  misc_feature (15)..(15): 2'-deoxy
  misc_feature (16)..(19): 2'-deoxy-2'-fluoro
  misc_feature (20)..(20): Phosphorothioate 3'-Internucleotide Linkage
  misc_feature (21)..(21): n stands for thymidine
ccaugaacuucaccacuucnn

SEQ ID NO: 3686 - RNA, 21 nt, Artificial Sequence
  Description of Artificial Sequence:  siNA antisense region
  misc_feature (1)..(1): 2'-deoxy-2'-fluoro
  misc_feature (2)..(2): 2'-deoxy
  misc_feature (3)..(7): 2'-deoxy-2'-fluoro
  misc_feature (8)..(13): 2'-deoxy
  misc_feature (14)..(14): 2'-deoxy-2'-fluoro
  misc_feature (15)..(15): 2'-deoxy
  misc_feature (16)..(18): 2'-deoxy-2'-fluoro
  misc_feature (19)..(19): 2'-deoxy
  misc_feature (20)..(20): Phosphorothioate 3'-Internucleotide Linkage
  misc_feature (21)..(21): n stands for thymidine
uacuccuggaagauguccann

SEQ ID NO: 3687 - RNA, 21 nt, Artificial Sequence
  Description of Artificial Sequence:  siNA antisense region
  misc_feature (1)..(1): 2'-deoxy
  misc_feature (2)..(2): 2'-deoxy-2'-fluoro
  misc_feature (3)..(3): 2'-deoxy
  misc_feature (4)..(8): 2'-deoxy-2'-fluoro
  misc_feature (9)..(14): 2'-deoxy
  misc_feature (15)..(15): 2'-deoxy-2'-fluoro
  misc_feature (16)..(16): 2'-deoxy
  misc_feature (17)..(19): 2'-deoxy-2'-fluoro
  misc_feature (20)..(20): Phosphorothioate 3'-Internucleotide Linkage
  misc_feature (21)..(21): n stands for thymidine
guacuccuggaagauguccnn

SEQ ID NO: 3688 - RNA, 21 nt, Artificial Sequence
  Description of Artificial Sequence:  siNA antisense region
  misc_feature (1)..(3): 2'-deoxy
  misc_feature (4)..(4): 2'-deoxy-2'-fluoro
  misc_feature (5)..(5): 2'-deoxy
  misc_feature (6)..(10): 2'-deoxy-2'-fluoro
  misc_feature (11)..(16): 2'-deoxy
  misc_feature (17)..(17): 2'-deoxy-2'-fluoro
  misc_feature (18)..(18): 2'-deoxy
  misc_feature (19)..(19): 2'-deoxy-2'-fluoro
  misc_feature (20)..(20): Phosphorothioate 3'-Internucleotide Linkage
  misc_feature (21)..(21): n stands for thymidine
ggguacuccuggaagaugunn

SEQ ID NO: 3689 - RNA, 21 nt, Artificial Sequence
  Description of Artificial Sequence:  siNA antisense region
  misc_feature (1)..(3): 2'-deoxy-2'-fluoro
  misc_feature (4)..(4): 2'-deoxy
  misc_feature (5)..(5): 2'-deoxy-2'-fluoro
  misc_feature (6)..(6): 2'-deoxy
  misc_feature (7)..(7): 2'-deoxy-2'-fluoro
  misc_feature (8)..(9): 2'-deoxy
  misc_feature (10)..(10): 2'-deoxy-2'-fluoro
  misc_feature (11)..(12): 2'-deoxy
  misc_feature (13)..(13): 2'-deoxy-2'-fluoro
  misc_feature (14)..(14): 2'-deoxy
  misc_feature (15)..(16): 2'-deoxy-2'-fluoro
  misc_feature (17)..(19): 2'-deoxy
  misc_feature (20)..(20): Phosphorothioate 3'-Internucleotide Linkage
  misc_feature (21)..(21): n stands for thymidine
ucugcauggugauguuggann

SEQ ID NO: 3690 - RNA, 21 nt, Artificial Sequence
  Description of Artificial Sequence:  siNA antisense region
  misc_feature (1)..(2): 2'-deoxy-2'-fluoro
  misc_feature (3)..(3): 2'-deoxy
  misc_feature (4)..(4): 2'-deoxy-2'-fluoro
  misc_feature (5)..(5): 2'-deoxy
  misc_feature (6)..(8): 2'-deoxy-2'-fluoro
  misc_feature (9)..(9): 2'-deoxy
  misc_feature (10)..(10): 2'-deoxy-2'-fluoro
  misc_feature (11)..(13): 2'-deoxy
  misc_feature (14)..(14): 2'-deoxy-2'-fluoro
  misc_feature (15)..(15): 2'-deoxy
  misc_feature (16)..(16): 2'-deoxy-2'-fluoro
  misc_feature (17)..(17): 2'-deoxy
  misc_feature (18)..(19): 2'-deoxy-2'-fluoro
  misc_feature (20)..(20): Phosphorothioate 3'-Internucleotide Linkage
  misc_feature (21)..(21): n stands for thymidine
ucacaucugcaaguacguunn

SEQ ID NO: 3691 - RNA, 21 nt, Artificial Sequence
  Description of Artificial Sequence:  siNA sense region
  misc_feature (1)..(1): 5'-3 attached terminal deoxyabasic moeity
  misc_feature (1)..(5): 2'-O-methyl
  misc_feature (6)..(9): 2'-deoxy-2'-fluoro
  misc_feature (10)..(18): 2'-O-methyl
  misc_feature (19)..(19): 2'-deoxy-2'-fluoro
  misc_feature (20)..(20): n stands for thymidine
  misc_feature (21)..(21): 3'-3 attached terminal deoxyabasic moeity
aagagcuccagagagaagunn

SEQ ID NO: 3692 - RNA, 21 nt, Artificial Sequence
  Description of Artificial Sequence:  siNA sense region
  misc_feature (1)..(3): 2'-O-methyl
  misc_feature (1)..(1): 5'-3 attached terminal deoxyabasic moeity
  misc_feature (4)..(4): 2'-deoxy-2'-fluoro
  misc_feature (5)..(7): 2'-O-methyl
  misc_feature (8)..(8): 2'-deoxy-2'-fluoro
  misc_feature (9)..(10): 2'-O-methyl
  misc_feature (11)..(13): 2'-deoxy-2'-fluoro
  misc_feature (14)..(14): 2'-O-methyl
  misc_feature (15)..(19): 2'-deoxy-2'-fluoro
  misc_feature (20)..(20): n stands for thymidine
  misc_feature (21)..(21): 3'-3 attached terminal deoxyabasic moeity
aagugagugaccugcuuuunn

SEQ ID NO: 3693 - RNA, 21 nt, Artificial Sequence
  Description of Artificial Sequence:  siNA sense region
  misc_feature (1)..(1): 5'-3 attached terminal deoxyabasic moeity
  misc_feature (1)..(4): 2'-O-methyl
  misc_feature (5)..(5): 2'-deoxy-2'-fluoro
  misc_feature (6)..(7): 2'-O-methyl
  misc_feature (8)..(8): 2'-deoxy-2'-fluoro
  misc_feature (9)..(12): 2'-O-methyl
  misc_feature (13)..(15): 2'-deoxy-2'-fluoro
  misc_feature (16)..(16): 2'-O-methyl
  misc_feature (17)..(17): 2'-deoxy-2'-fluoro
  misc_feature (18)..(19): 2'-O-methyl
  misc_feature (20)..(20): n stands for thymidine
  misc_feature (21)..(21): 3'-3 attached terminal deoxyabasic moeity
gaaguggugaaguucauggnn

SEQ ID NO: 3694 - RNA, 21 nt, Artificial Sequence
  Description of Artificial Sequence:  siNA sense region
  misc_feature (1)..(1): 2'-deoxy-2'-fluoro
  misc_feature (1)..(1): 5'-3 attached terminal deoxyabasic moeity
  misc_feature (2)..(4): 2'-O-methyl
  misc_feature (5)..(5): 2'-deoxy-2'-fluoro
  misc_feature (6)..(6): 2'-O-methyl
  misc_feature (7)..(12): 2'-deoxy-2'-fluoro
  misc_feature (13)..(17): 2'-O-methyl
  misc_feature (18)..(18): 2'-deoxy-2'-fluoro
  misc_feature (19)..(19): 2'-O-methyl
  misc_feature (20)..(20): n stands for thymidine
  misc_feature (21)..(21): 5'-3 attached terminal deoxyabasic moeity
uggacaucuuccaggaguann

SEQ ID NO: 3695 - RNA, 21 nt, Artificial Sequence
  Description of Artificial Sequence:  siNA sense region
  misc_feature (1)..(1): 5'-3 attached terminal deoxyabasic moeity
  misc_feature (1)..(3): 2'-O-methyl
  misc_feature (4)..(4): 2'-deoxy-2'-fluoro
  misc_feature (5)..(5): 2'-O-methyl
  misc_feature (6)..(11): 2'-deoxy-2'-fluoro
  misc_feature (12)..(16): 2'-O-methyl
  misc_feature (17)..(17): 2'-deoxy-2'-fluoro
  misc_feature (18)..(18): 2'-O-methyl
  misc_feature (19)..(19): 2'-deoxy-2'-fluoro
  misc_feature (20)..(20): n stands for thymidine
  misc_feature (21)..(21): 3'-3 attached terminal deoxyabasic moeity
ggacaucuuccaggaguacnn

SEQ ID NO: 3696 - RNA, 21 nt, Artificial Sequence
  Description of Artificial Sequence:  siNA sense region
  misc_feature (1)..(1): 2'-O-methyl
  misc_feature (1)..(1): 5'-3 attached terminal deoxyabasic moeity
  misc_feature (2)..(2): 2'-deoxy-2'-fluoro
  misc_feature (3)..(3): 2'-O-methyl
  misc_feature (4)..(9): 2'-deoxy-2'-fluoro
  misc_feature (10)..(14): 2'-O-methyl
  misc_feature (15)..(15): 2'-deoxy-2'-fluoro
  misc_feature (16)..(16): 2'-O-methyl
  misc_feature (17)..(19): 2'-deoxy-2'-fluoro
  misc_feature (20)..(20): n stands for thymidine
  misc_feature (21)..(21): 3'-3 attached terminal deoxyabasic moeity
acaucuuccaggaguacccnn

SEQ ID NO: 3697 - RNA, 21 nt, Artificial Sequence
  Description of Artificial Sequence:  siNA sense region
  misc_feature (1)..(1): 5'-3 attached terminal deoxyabasic moeity
  misc_feature (1)..(3): 2'-deoxy-2'-fluoro
  misc_feature (4)..(5): 2'-O-methyl
  misc_feature (6)..(6): 2'-deoxy-2'-fluoro
  misc_feature (7)..(7): 2'-O-methyl
  misc_feature (8)..(9): 2'-deoxy-2'-fluoro
  misc_feature (10)..(10): 2'-O-methyl
  misc_feature (11)..(12): 2'-deoxy-2'-fluoro
  misc_feature (13)..(13): 2'-O-methyl
  misc_feature (14)..(14): 2'-deoxy-2'-fluoro
  misc_feature (15)..(15): 2'-O-methyl
  misc_feature (17)..(19): 2'-O-methyl
  misc_feature (20)..(20): n stands for thymidine
  misc_feature (21)..(21): 3'-3 attached terminal deoxyabasic moeity
  misc_feature (116)..(16): 2'-deoxy-2'-fluoro
uccaacaucaccaugcagann

SEQ ID NO: 3698 - RNA, 21 nt, Artificial Sequence
  Description of Artificial Sequence:  siNA sense region
  misc_feature (1)..(2): 2'-O-methyl
  misc_feature (1)..(1): 5'-3 attached terminal deoxyabasic moeity
  misc_feature (3)..(3): 2'-deoxy-2'-fluoro
  misc_feature (4)..(4): 2'-O-methyl
  misc_feature (5)..(5): 2'-deoxy-2'-fluoro
  misc_feature (6)..(6): 2'-O-methyl
  misc_feature (7)..(9): 2'-deoxy-2'-fluoro
  misc_feature (10)..(10): 2'-O-methyl
  misc_feature (11)..(11): 2'-deoxy-2'-fluoro
  misc_feature (12)..(14): 2'-O-methyl
  misc_feature (15)..(15): 2'-deoxy-2'-fluoro
  misc_feature (16)..(16): 2'-O-methyl
  misc_feature (17)..(17): 2'-deoxy-2'-fluoro
  misc_feature (18)..(19): 2'-O-methyl
  misc_feature (20)..(20): n stands for thymidine
  misc_feature (21)..(21): 3'-3 attached terminal deoxyabasic moeity
aacguacuugcagaugugann

SEQ ID NO: 3699 - RNA, 21 nt, Artificial Sequence
  Description of Artificial Sequence:  siNA antisense region
  misc_feature (1)..(1): 2'-O-methyl
  misc_feature (2)..(10): 2'-deoxy-2'-fluoro
  misc_feature (11)..(14): 2'-O-methyl
  misc_feature (15)..(19): 2'-deoxy-2'-fluoro
  misc_feature (20)..(20): Phosphorothioate 3'-Internucleotide Linkage
  misc_feature (21)..(21): n stands for thymidine
acuucucucuggagcucuunn

SEQ ID NO: 3700 - RNA, 21 nt, Artificial Sequence
  Description of Artificial Sequence:  siNA antisense region
  misc_feature (1)..(5): 2'-O-methyl
  misc_feature (6)..(6): 2'-deoxy-2'-fluoro
  misc_feature (7)..(9): 2'-O-methyl
  misc_feature (10)..(11): 2'-deoxy-2'-fluoro
  misc_feature (12)..(12): 2'-O-methyl
  misc_feature (13)..(15): 2'-deoxy-2'-fluoro
  misc_feature (16)..(16): 2'-O-methyl
  misc_feature (17)..(19): 2'-deoxy-2'-fluoro
  misc_feature (20)..(20): Phosphorothioate 3'-Internucleotide Linkage
  misc_feature (21)..(21): n stands for thymidine
aaaagcaggucacucacuunn

SEQ ID NO: 3701 - RNA, 21 nt, Artificial Sequence
  Description of Artificial Sequence:  siNA antisense region
  misc_feature (1)..(2): 2'-deoxy-2'-fluoro
  misc_feature (3)..(3): 2'-O-methyl
  misc_feature (4)..(4): 2'-deoxy-2'-fluoro
  misc_feature (5)..(7): 2'-O-methyl
  misc_feature (8)..(11): 2'-deoxy-2'-fluoro
  misc_feature (12)..(12): 2'-O-methyl
  misc_feature (13)..(14): 2'-deoxy-2'-fluoro
  misc_feature (15)..(15): 2'-O-methyl
  misc_feature (16)..(19): 2'-deoxy-2'-fluoro
  misc_feature (20)..(20): Phosphorothioate 3'-Internucleotide Linkage
  misc_feature (21)..(21): n stands for thymidine
ccaugaacuucaccacuucnn

SEQ ID NO: 3702 - RNA, 21 nt, Artificial Sequence
  Description of Artificial Sequence:  siNA antisense region
  misc_feature (1)..(1): 2'-deoxy-2'-fluoro
  misc_feature (2)..(2): 2'-O-methyl
  misc_feature (3)..(7): 2'-deoxy-2'-fluoro
  misc_feature (8)..(13): 2'-O-methyl
  misc_feature (14)..(14): 2'-deoxy-2'-fluoro
  misc_feature (15)..(15): 2'-O-methyl
  misc_feature (16)..(18): 2'-deoxy-2'-fluoro
  misc_feature (19)..(19): 2'-O-methyl
  misc_feature (20)..(20): Phosphorothioate 3'-Internucleotide Linkage
  misc_feature (21)..(21): n stands for thymidine
uacuccuggaagauguccann

SEQ ID NO: 3703 - RNA, 21 nt, Artificial Sequence
  Description of Artificial Sequence:  siNA antisense region
  misc_feature (1)..(1): 2'-O-methyl
  misc_feature (2)..(2): 2'-deoxy-2'-fluoro
  misc_feature (3)..(3): 2'-O-methyl
  misc_feature (4)..(8): 2'-deoxy-2'-fluoro
  misc_feature (9)..(14): 2'-O-methyl
  misc_feature (15)..(15): 2'-deoxy-2'-fluoro
  misc_feature (16)..(16): 2'-O-methyl
  misc_feature (17)..(19): 2'-deoxy-2'-fluoro
  misc_feature (20)..(20): Phosphorothioate 3'-Internucleotide Linkage
  misc_feature (21)..(21): n stands for thymidine
guacuccuggaagauguccnn

SEQ ID NO: 3704 - RNA, 21 nt, Artificial Sequence
  Description of Artificial Sequence:  siNA antisense region
  misc_feature (1)..(3): 2'-O-methyl
  misc_feature (4)..(4): 2'-deoxy-2'-fluoro
  misc_feature (5)..(5): 2'-O-methyl
  misc_feature (6)..(10): 2'-deoxy-2'-fluoro
  misc_feature (11)..(16): 2'-O-methyl
  misc_feature (17)..(17): 2'-deoxy-2'-fluoro
  misc_feature (18)..(18): 2'-O-methyl
  misc_feature (19)..(19): 2'-deoxy-2'-fluoro
  misc_feature (20)..(20): Phosphorothioate 3'-Internucleotide Linkage
  misc_feature (21)..(21): n stands for thymidine
ggguacuccuggaagaugunn

SEQ ID NO: 3705 - RNA, 21 nt, Artificial Sequence
  Description of Artificial Sequence:  siNA antisense region
  misc_feature (1)..(3): 2'-deoxy-2'-fluoro
  misc_feature (4)..(4): 2'-O-methyl
  misc_feature (5)..(5): 2'-deoxy-2'-fluoro
  misc_feature (6)..(6): 2'-O-methyl
  misc_feature (7)..(7): 2'-deoxy-2'-fluoro
  misc_feature (8)..(9): 2'-O-methyl
  misc_feature (10)..(10): 2'-deoxy-2'-fluoro
  misc_feature (11)..(12): 2'-O-methyl
  misc_feature (13)..(13): 2'-deoxy-2'-fluoro
  misc_feature (14)..(14): 2'-O-methyl
  misc_feature (15)..(16): 2'-deoxy-2'-fluoro
  misc_feature (17)..(19): 2'-O-methyl
  misc_feature (20)..(20): Phosphorothioate 3'-Internucleotide Linkage
  misc_feature (21)..(21): n stands for thymidine
ucugcauggugauguuggann

SEQ ID NO: 3706 - RNA, 21 nt, Artificial Sequence
  Description of Artificial Sequence:  siNA antisense region
  misc_feature (1)..(2): 2'-deoxy-2'-fluoro
  misc_feature (3)..(3): 2'-O-methyl
  misc_feature (4)..(4): 2'-deoxy-2'-fluoro
  misc_feature (5)..(5): 2'-O-methyl
  misc_feature (6)..(8): 2'-deoxy-2'-fluoro
  misc_feature (9)..(9): 2'-O-methyl
  misc_feature (10)..(10): 2'-deoxy-2'-fluoro
  misc_feature (11)..(13): 2'-O-methyl
  misc_feature (14)..(14): 2'-deoxy-2'-fluoro
  misc_feature (15)..(15): 2'-O-methyl
  misc_feature (16)..(16): 2'-deoxy-2'-fluoro
  misc_feature (17)..(17): 2'-O-methyl
  misc_feature (18)..(19): 2'-deoxy-2'-fluoro
  misc_feature (20)..(20): Phosphorothioate 3'-Internucleotide Linkage
  misc_feature (21)..(21): n stands for thymidine
ucacaucugcaaguacguunn

SEQ ID NO: 3707 - RNA, 21 nt, Artificial Sequence
  Description of Artificial Sequence:  siNA sense region
  misc_feature (1)..(1): 5'-3 attached terminal deoxyabasic moeity
  misc_feature (20)..(20): n stands for thymidine
  misc_feature (21)..(21): 3'-3 attached terminal deoxyabasic moeity
aagagcuccagagagaagunn

SEQ ID NO: 3708 - RNA, 21 nt, Artificial Sequence
  Description of Artificial Sequence:  siNA sense region
  misc_feature (1)..(1): 5'-3 attached terminal deoxyabasic moeity
  misc_feature (20)..(20): n stands for thymidine
  misc_feature (21)..(21): 3'-3 attached terminal deoxyabasic moeity
aagugagugaccugcuuuunn

SEQ ID NO: 3709 - RNA, 21 nt, Artificial Sequence
  Description of Artificial Sequence:  siNA sense region
  misc_feature (1)..(1): 5'-3 attached terminal deoxyabasic moeity
  misc_feature (20)..(20): n stands for thymidine
  misc_feature (21)..(21): 3'-3 attached terminal deoxyabasic moeity
gaaguggugaaguucauggnn

SEQ ID NO: 3710 - RNA, 21 nt, Artificial Sequence
  Description of Artificial Sequence:  siNA sense region
  misc_feature (1)..(1): 5'-3 attached terminal deoxyabasic moeity
  misc_feature (20)..(20): n stands for thymidine
  misc_feature (21)..(21): 3'-3 attached terminal deoxyabasic moeity
uggacaucuuccaggaguann

SEQ ID NO: 3711 - RNA, 21 nt, Artificial Sequence
  Description of Artificial Sequence:  siNA sense region
  misc_feature (1)..(1): 5'-3 attached terminal deoxyabasic moeity
  misc_feature (20)..(20): n stands for thymidine
  misc_feature (21)..(21): 3'-3 attached terminal deoxyabasic moeity
ggacaucuuccaggaguacnn

SEQ ID NO: 3712 - RNA, 21 nt, Artificial Sequence
  Description of Artificial Sequence:  siNA sense region
  misc_feature (1)..(1): 5'-3 attached terminal deoxyabasic moeity
  misc_feature (20)..(20): n stands for thymidine
  misc_feature (21)..(21): 3'-3 attached terminal deoxyabasic moeity
acaucuuccaggaguacccnn

SEQ ID NO: 3713 - RNA, 21 nt, Artificial Sequence
  Description of Artificial Sequence:  siNA sense region
  misc_feature (1)..(1): 5'-3 attached terminal deoxyabasic moeity
  misc_feature (20)..(20): n stands for thymidine
  misc_feature (21)..(21): 3'-3 attached terminal deoxyabasic moeity
uccaacaucaccaugcagann

SEQ ID NO: 3714 - RNA, 21 nt, Artificial Sequence
  Description of Artificial Sequence:  siNA sense region
  misc_feature (1)..(1): 5'-3 attached terminal deoxyabasic moeity
  misc_feature (20)..(20): n stands for thymidine
  misc_feature (21)..(21): 3'-3 attached terminal deoxyabasic moeity
aacguacuugcagaugugann

SEQ ID NO: 3715 - RNA, 21 nt, Artificial Sequence
  Description of Artificial Sequence:  siNA antisense region
  misc_feature (20)..(20): Phosphorothioate 3'-Internucleotide Linkage
  misc_feature (21)..(21): n stands for thymidine
acuucucucuggagcucuunn

SEQ ID NO: 3716 - RNA, 21 nt, Artificial Sequence
  Description of Artificial Sequence:  siNA antisense region
  misc_feature (20)..(20): Phosphorothioate 3'-Internucleotide Linkage
  misc_feature (21)..(21): n stands for thymidine
aaaagcaggucacucacuunn

SEQ ID NO: 3717 - RNA, 21 nt, Artificial Sequence
  Description of Artificial Sequence:  siNA antisense region
  misc_feature (20)..(20): Phosphorothioate 3'-Internucleotide Linkage
  misc_feature (21)..(21): n stands for thymidine
ccaugaacuucaccacuucnn

SEQ ID NO: 3718 - RNA, 21 nt, Artificial Sequence
  Description of Artificial Sequence:  siNA antisense region
  misc_feature (20)..(20): Phosphorothioate 3'-Internucleotide Linkage
  misc_feature (21)..(21): n stands for thymidine
uacuccuggaagauguccann

SEQ ID NO: 3719 - RNA, 21 nt, Artificial Sequence
  Description of Artificial Sequence:  siNA antisense region
  misc_feature (20)..(20): Phosphorothioate 3'-Internucleotide Linkage
  misc_feature (21)..(21): n stands for thymidine
guacuccuggaagauguccnn

SEQ ID NO: 3720 - RNA, 21 nt, Artificial Sequence
  Description of Artificial Sequence:  siNA antisense region
  misc_feature (20)..(20): Phosphorothioate 3'-Internucleotide Linkage
  misc_feature (21)..(21): n stands for thymidine
ggguacuccuggaagaugunn

SEQ ID NO: 3721 - RNA, 21 nt, Artificial Sequence
  Description of Artificial Sequence:  siNA antisense region
  misc_feature (20)..(20): Phosphorothioate 3'-Internucleotide Linkage
  misc_feature (21)..(21): n stands for thymidine
ucugcauggugauguuggann

SEQ ID NO: 3722 - RNA, 21 nt, Artificial Sequence
  Description of Artificial Sequence:  siNA antisense region
  misc_feature (20)..(20): Phosphorothioate 3'-Internucleotide Linkage
  misc_feature (21)..(21): n stands for thymidine
ucacaucugcaaguacguunn

SEQ ID NO: 3723 - RNA, 21 nt, Artificial Sequence
  Description of Artificial Sequence:  siNA antisense region
  misc_feature (2)..(10): 2'-deoxy-2'-fluoro
  misc_feature (15)..(19): 2'-deoxy-2'-fluoro
  misc_feature (20)..(20): n stands for thymidine
  misc_feature (21)..(21): 3'-3 attached terminal deoxyabasic moeity
acuucucucuggagcucuunn

SEQ ID NO: 3724 - RNA, 21 nt, Artificial Sequence
  Description of Artificial Sequence:  siNA antisense region
  misc_feature (6)..(6): 2'-deoxy-2'-fluoro
  misc_feature (10)..(11): 2'-deoxy-2'-fluoro
  misc_feature (13)..(15): 2'-deoxy-2'-fluoro
  misc_feature (17)..(19): 2'-deoxy-2'-fluoro
  misc_feature (20)..(20): n stands for thymidine
  misc_feature (21)..(21): 3'-3 attached terminal deoxyabasic moeity
aaaagcaggucacucacuunn

SEQ ID NO: 3725 - RNA, 21 nt, Artificial Sequence
  Description of Artificial Sequence:  siNA antisense region
  misc_feature (1)..(2): 2'-deoxy-2'-fluoro
  misc_feature (3)..(3): 2'-O-methyl
  misc_feature (4)..(4): 2'-deoxy-2'-fluoro
  misc_feature (5)..(7): 2'-O-methyl
  misc_feature (8)..(11): 2'-deoxy-2'-fluoro
  misc_feature (12)..(12): 2'-O-methyl
  misc_feature (13)..(14): 2'-deoxy-2'-fluoro
  misc_feature (15)..(15): 2'-O-methyl
  misc_feature (16)..(19): 2'-deoxy-2'-fluoro
  misc_feature (20)..(20): n stands for thymidine
  misc_feature (21)..(21): 3'-3 attached terminal deoxyabasic moeity
ccaugaacuucaccacuucnn

SEQ ID NO: 3726 - RNA, 21 nt, Artificial Sequence
  Description of Artificial Sequence:  siNA antisense region
  misc_feature (1)..(1): 2'-deoxy-2'-fluoro
  misc_feature (2)..(2): 2'-O-methyl
  misc_feature (3)..(7): 2'-deoxy-2'-fluoro
  misc_feature (8)..(13): 2'-O-methyl
  misc_feature (14)..(14): 2'-deoxy-2'-fluoro
  misc_feature (15)..(15): 2'-O-methyl
  misc_feature (16)..(18): 2'-deoxy-2'-fluoro
  misc_feature (19)..(19): 2'-O-methyl
  misc_feature (20)..(20): n stands for thymidine
  misc_feature (21)..(21): 3'-3 attached terminal deoxyabasic moeity
uacuccuggaagauguccann

SEQ ID NO: 3727 - RNA, 21 nt, Artificial Sequence
  Description of Artificial Sequence:  siNA antisense region
  misc_feature (1)..(1): 2'-O-methyl
  misc_feature (2)..(2): 2'-deoxy-2'-fluoro
  misc_feature (3)..(3): 2'-O-methyl
  misc_feature (4)..(8): 2'-deoxy-2'-fluoro
  misc_feature (9)..(14): 2'-O-methyl
  misc_feature (15)..(15): 2'-deoxy-2'-fluoro
  misc_feature (16)..(16): 2'-O-methyl
  misc_feature (17)..(19): 2'-deoxy-2'-fluoro
  misc_feature (20)..(20): n stands for thymidine
  misc_feature (21)..(21): 3'-3 attached terminal deoxyabasic moeity
guacuccuggaagauguccnn

SEQ ID NO: 3728 - RNA, 21 nt, Artificial Sequence
  Description of Artificial Sequence:  siNA antisense region
  misc_feature (1)..(3): 2'-O-methyl
  misc_feature (4)..(4): 2'-deoxy-2'-fluoro
  misc_feature (5)..(5): 2'-O-methyl
  misc_feature (6)..(10): 2'-deoxy-2'-fluoro
  misc_feature (11)..(16): 2'-O-methyl
  misc_feature (17)..(17): 2'-deoxy-2'-fluoro
  misc_feature (18)..(18): 2'-O-methyl
  misc_feature (19)..(19): 2'-deoxy-2'-fluoro
  misc_feature (20)..(20): n stands for thymidine
  misc_feature (21)..(21): 3'-3 attached terminal deoxyabasic moeity
ggguacuccuggaagaugunn

SEQ ID NO: 3729 - RNA, 21 nt, Artificial Sequence
  Description of Artificial Sequence:  siNA antisense region
  misc_feature (1)..(3): 2'-deoxy-2'-fluoro
  misc_feature (4)..(4): 2'-O-methyl
  misc_feature (5)..(5): 2'-deoxy-2'-fluoro
  misc_feature (6)..(6): 2'-O-methyl
  misc_feature (7)..(7): 2'-deoxy-2'-fluoro
  misc_feature (8)..(9): 2'-O-methyl
  misc_feature (10)..(10): 2'-deoxy-2'-fluoro
  misc_feature (11)..(12): 2'-O-methyl
  misc_feature (13)..(13): 2'-deoxy-2'-fluoro
  misc_feature (14)..(14): 2'-O-methyl
  misc_feature (15)..(16): 2'-deoxy-2'-fluoro
  misc_feature (17)..(19): 2'-O-methyl
  misc_feature (20)..(20): n stands for thymidine
  misc_feature (21)..(21): 3'-3 attached terminal deoxyabasic moeity
ucugcauggugauguuggann

SEQ ID NO: 3730 - RNA, 21 nt, Artificial Sequence
  Description of Artificial Sequence:  siNA antisense region
  misc_feature (1)..(2): 2'-deoxy-2'-fluoro
  misc_feature (3)..(3): 2'-O-methyl
  misc_feature (4)..(4): 2'-deoxy-2'-fluoro
  misc_feature (5)..(5): 2'-O-methyl
  misc_feature (6)..(8): 2'-deoxy-2'-fluoro
  misc_feature (9)..(9): 2'-O-methyl
  misc_feature (10)..(10): 2'-deoxy-2'-fluoro
  misc_feature (11)..(13): 2'-O-methyl
  misc_feature (14)..(14): 2'-deoxy-2'-fluoro
  misc_feature (15)..(15): 2'-O-methyl
  misc_feature (16)..(16): 2'-deoxy-2'-fluoro
  misc_feature (17)..(17): 2'-O-methyl
  misc_feature (18)..(19): 2'-deoxy-2'-fluoro
  misc_feature (20)..(20): n stands for thymidine
  misc_feature (21)..(21): 3'-3 attached terminal deoxyabasic moeity
ucacaucugcaaguacguunn

SEQ ID NO: 3731 - RNA, 21 nt, Artificial Sequence
  Description of Artificial Sequence:  siNA antisense region
  misc_feature (20)..(20): n stands for thymidine
  misc_feature (21)..(21): 3'-3 attached terminal deoxyabasic moeity
acuucucucuggagcucuunn

SEQ ID NO: 3732 - RNA, 21 nt, Artificial Sequence
  Description of Artificial Sequence:  siNA antisense region
  misc_feature (20)..(20): n stands for thymidine
  misc_feature (21)..(21): 3'-3 attached terminal deoxyabasic moeity
aaaagcaggucacucacuunn

SEQ ID NO: 3733 - RNA, 21 nt, Artificial Sequence
  Description of Artificial Sequence:  siNA antisense region
  misc_feature (20)..(20): n stands for thymidine
  misc_feature (21)..(21): 3'-3 attached terminal deoxyabasic moeity
ccaugaacuucaccacuucnn

SEQ ID NO: 3734 - RNA, 21 nt, Artificial Sequence
  Description of Artificial Sequence:  siNA antisense region
  misc_feature (20)..(20): n stands for thymidine
  misc_feature (21)..(21): 3'-3 attached terminal deoxyabasic moeity
uacuccuggaagauguccann

SEQ ID NO: 3735 - RNA, 21 nt, Artificial Sequence
  Description of Artificial Sequence:  siNA antisense region
  misc_feature (20)..(20): n stands for thymidine
  misc_feature (21)..(21): 3'-3 attached terminal deoxyabasic moeity
guacuccuggaagauguccnn

SEQ ID NO: 3736 - RNA, 21 nt, Artificial Sequence
  Description of Artificial Sequence:  siNA antisense region
  misc_feature (20)..(20): n stands for thymidine
  misc_feature (21)..(21): 3'-3 attached terminal deoxyabasic moeity
ggguacuccuggaagaugunn

SEQ ID NO: 3737 - RNA, 21 nt, Artificial Sequence
  Description of Artificial Sequence:  siNA antisense region
  misc_feature (20)..(20): n stands for thymidine
  misc_feature (21)..(21): 3'-3 attached terminal deoxyabasic moeity
ucugcauggugauguuggann

SEQ ID NO: 3738 - RNA, 21 nt, Artificial Sequence
  Description of Artificial Sequence:  siNA antisense region
  misc_feature (20)..(20): n stands for thymidine
  misc_feature (21)..(21): 3'-3 attached terminal deoxyabasic moeity
ucacaucugcaaguacguunn

SEQ ID NO: 3739 - RNA, 21 nt, Artificial Sequence
  Description of Artificial Sequence:  siNA sense region
  misc_feature (20)..(21): n stands for thymidine
acccugguggacaucuuccnn

SEQ ID NO: 3740 - RNA, 21 nt, Artificial Sequence
  Description of Artificial Sequence:  siNA sense region
  misc_feature (20)..(21): n stands for thymidine
ugcggaucaaaccucaccann

SEQ ID NO: 3741 - RNA, 21 nt, Artificial Sequence
  Description of Artificial Sequence:  siNA sense region
  misc_feature (20)..(21): n stands for thymidine
augugaaugcagaccaaagnn

SEQ ID NO: 3742 - RNA, 21 nt, Artificial Sequence
  Description of Artificial Sequence:  siNA sense region
  misc_feature (20)..(21): n stands for thymidine
ugugaaugcagaccaaagann

SEQ ID NO: 3743 - RNA, 21 nt, Artificial Sequence
  Description of Artificial Sequence:  siNA sense region
  misc_feature (20)..(21): n stands for thymidine
gugaaugcagaccaaagaann

SEQ ID NO: 3744 - RNA, 21 nt, Artificial Sequence
  Description of Artificial Sequence:  siNA sense region
  misc_feature (20)..(21): n stands for thymidine
gaaugcagaccaaagaaagnn

SEQ ID NO: 3745 - RNA, 21 nt, Artificial Sequence
  Description of Artificial Sequence:  siNA sense region
  misc_feature (20)..(21): n stands for thymidine
gacguguaaauguuccugcnn

SEQ ID NO: 3746 - RNA, 21 nt, Artificial Sequence
  Description of Artificial Sequence:  siNA sense region
  misc_feature (20)..(21): n stands for thymidine
uguaaauguuccugcaaaann

SEQ ID NO: 3747 - RNA, 21 nt, Artificial Sequence
  Description of Artificial Sequence:  siNA sense region
  misc_feature (20)..(21): n stands for thymidine
guaaauguuccugcaaaaann

SEQ ID NO: 3748 - RNA, 21 nt, Artificial Sequence
  Description of Artificial Sequence:  siNA sense region
  misc_feature (20)..(21): n stands for thymidine
uaaauguuccugcaaaaacnn

SEQ ID NO: 3749 - RNA, 21 nt, Artificial Sequence
  Description of Artificial Sequence:  siNA sense region
  misc_feature (20)..(21): n stands for thymidine
aaauguuccugcaaaaacann

SEQ ID NO: 3750 - RNA, 21 nt, Artificial Sequence
  Description of Artificial Sequence:  siNA sense region
  misc_feature (20)..(21): n stands for thymidine
gcaaaaacacagacucgcgnn

SEQ ID NO: 3751 - RNA, 21 nt, Artificial Sequence
  Description of Artificial Sequence:  siNA sense region
  misc_feature (20)..(21): n stands for thymidine
agcuugaguuaaacgaacgnn

SEQ ID NO: 3752 - RNA, 21 nt, Artificial Sequence
  Description of Artificial Sequence:  siNA sense region
  misc_feature (20)..(21): n stands for thymidine
uacuugcagaugugacaagnn

SEQ ID NO: 3753 - RNA, 21 nt, Artificial Sequence
  Description of Artificial Sequence:  siNA antisense region
  misc_feature (20)..(21): n stands for thymidine
ggaagauguccaccagggunn

SEQ ID NO: 3754 - RNA, 21 nt, Artificial Sequence
  Description of Artificial Sequence:  siNA antisense region
  misc_feature (20)..(21): n stands for thymidine
uggugagguuugauccgcann

SEQ ID NO: 3755 - RNA, 21 nt, Artificial Sequence
  Description of Artificial Sequence:  siNA antisense region
  misc_feature (20)..(21): n stands for thymidine
cuuuggucugcauucacaunn

SEQ ID NO: 3756 - RNA, 21 nt, Artificial Sequence
  Description of Artificial Sequence:  siNA antisense region
  misc_feature (20)..(21): n stands for thymidine
ucuuuggucugcauucacann

SEQ ID NO: 3757 - RNA, 21 nt, Artificial Sequence
  Description of Artificial Sequence:  siNA antisense region
  misc_feature (20)..(21): n stands for thymidine
uucuuuggucugcauucacnn

SEQ ID NO: 3758 - RNA, 21 nt, Artificial Sequence
  Description of Artificial Sequence:  siNA antisense region
  misc_feature (20)..(21): n stands for thymidine
cuuucuuuggucugcauucnn

SEQ ID NO: 3759 - RNA, 21 nt, Artificial Sequence
  Description of Artificial Sequence:  siNA antisense region
  misc_feature (20)..(21): n stands for thymidine
gcaggaacauuuacacgucnn

SEQ ID NO: 3760 - RNA, 21 nt, Artificial Sequence
  Description of Artificial Sequence:  siNA antisense region
  misc_feature (20)..(21): n stands for thymidine
uuuugcaggaacauuuacann

SEQ ID NO: 3761 - RNA, 21 nt, Artificial Sequence
  Description of Artificial Sequence:  siNA antisense region
  misc_feature (20)..(21): n stands for thymidine
uuuuugcaggaacauuuacnn

SEQ ID NO: 3762 - RNA, 21 nt, Artificial Sequence
  Description of Artificial Sequence:  siNA antisense region
  misc_feature (20)..(21): n stands for thymidine
guuuuugcaggaacauuuann

SEQ ID NO: 3763 - RNA, 21 nt, Artificial Sequence
  Description of Artificial Sequence:  siNA antisense region
  misc_feature (20)..(21): n stands for thymidine
uguuuuugcaggaacauuunn

SEQ ID NO: 3764 - RNA, 21 nt, Artificial Sequence
  Description of Artificial Sequence:  siNA antisense region
  misc_feature (20)..(21): n stands for thymidine
cgcgagucuguguuuuugcnn

SEQ ID NO: 3765 - RNA, 21 nt, Artificial Sequence
  Description of Artificial Sequence:  siNA antisense region
  misc_feature (20)..(21): n stands for thymidine
cguucguuuaacucaagcunn

SEQ ID NO: 3766 - RNA, 21 nt, Artificial Sequence
  Description of Artificial Sequence:  siNA antisense region
  misc_feature (20)..(21): n stands for thymidine
cuugucacaucugcaaguann

SEQ ID NO: 3767 - RNA, 21 nt, Artificial Sequence
  Description of Artificial Sequence:  siNA sense region
  misc_feature (20)..(21): n stands for thymidine
gacccugguggacaucuucnn

SEQ ID NO: 3768 - RNA, 21 nt, Artificial Sequence
  Description of Artificial Sequence:  siNA sense region
  misc_feature (20)..(21): n stands for thymidine
cccugguggacaucuuccann

SEQ ID NO: 3769 - RNA, 21 nt, Artificial Sequence
  Description of Artificial Sequence:  siNA sense region
  misc_feature (20)..(21): n stands for thymidine
agagcggagaaagcauuugnn

SEQ ID NO: 3770 - RNA, 21 nt, Artificial Sequence
  Description of Artificial Sequence:  siNA sense region
  misc_feature (20)..(21): n stands for thymidine
ccgcagacguguaaauguunn

SEQ ID NO: 3771 - RNA, 21 nt, Artificial Sequence
  Description of Artificial Sequence:  siNA sense region
  misc_feature (20)..(21): n stands for thymidine
gcagacguguaaauguuccnn

SEQ ID NO: 3772 - RNA, 21 nt, Artificial Sequence
  Description of Artificial Sequence:  siNA sense region
  misc_feature (20)..(21): n stands for thymidine
cagacguguaaauguuccunn

SEQ ID NO: 3773 - RNA, 21 nt, Artificial Sequence
  Description of Artificial Sequence:  siNA sense region
  misc_feature (20)..(21): n stands for thymidine
cguguaaauguuccugcaann

SEQ ID NO: 3774 - RNA, 21 nt, Artificial Sequence
  Description of Artificial Sequence:  siNA sense region
  misc_feature (20)..(21): n stands for thymidine
aauguuccugcaaaaacacnn

SEQ ID NO: 3775 - RNA, 21 nt, Artificial Sequence
  Description of Artificial Sequence:  siNA sense region
  misc_feature (20)..(21): n stands for thymidine
auguuccugcaaaaacacann

SEQ ID NO: 3776 - RNA, 21 nt, Artificial Sequence
  Description of Artificial Sequence:  siNA sense region
  misc_feature (20)..(21): n stands for thymidine
cugcaaaaacacagacucgnn

SEQ ID NO: 3777 - RNA, 21 nt, Artificial Sequence
  Description of Artificial Sequence:  siNA sense region
  misc_feature (20)..(21): n stands for thymidine
ugcaaaaacacagacucgcnn

SEQ ID NO: 3778 - RNA, 21 nt, Artificial Sequence
  Description of Artificial Sequence:  siNA sense region
  misc_feature (20)..(21): n stands for thymidine
gcgaggcagcuugaguuaann

SEQ ID NO: 3779 - RNA, 21 nt, Artificial Sequence
  Description of Artificial Sequence:  siNA sense region
  misc_feature (20)..(21): n stands for thymidine
aggcagcuugaguuaaacgnn

SEQ ID NO: 3780 - RNA, 21 nt, Artificial Sequence
  Description of Artificial Sequence:  siNA sense region
  misc_feature (20)..(21): n stands for thymidine
ggcagcuugaguuaaacgann

SEQ ID NO: 3781 - RNA, 21 nt, Artificial Sequence
  Description of Artificial Sequence:  siNA sense region
  misc_feature (20)..(21): n stands for thymidine
gcagcuugaguuaaacgaann

SEQ ID NO: 3782 - RNA, 21 nt, Artificial Sequence
  Description of Artificial Sequence:  siNA sense region
  misc_feature (20)..(21): n stands for thymidine
cagcuugaguuaaacgaacnn

SEQ ID NO: 3783 - RNA, 21 nt, Artificial Sequence
  Description of Artificial Sequence:  siNA sense region
  misc_feature (20)..(21): n stands for thymidine
aacgaacguacuugcagaunn

SEQ ID NO: 3784 - RNA, 21 nt, Artificial Sequence
  Description of Artificial Sequence:  siNA sense region
  misc_feature (20)..(21): n stands for thymidine
acgaacguacuugcagaugnn

SEQ ID NO: 3785 - RNA, 21 nt, Artificial Sequence
  Description of Artificial Sequence:  siNA antisense region
  misc_feature (20)..(21): n stands for thymidine
gaagauguccaccagggucnn

SEQ ID NO: 3786 - RNA, 21 nt, Artificial Sequence
  Description of Artificial Sequence:  siNA antisense region
  misc_feature (20)..(21): n stands for thymidine
uggaagauguccaccagggnn

SEQ ID NO: 3787 - RNA, 21 nt, Artificial Sequence
  Description of Artificial Sequence:  siNA antisense region
  misc_feature (20)..(21): n stands for thymidine
caaaugcuuucuccgcucunn

SEQ ID NO: 3788 - RNA, 21 nt, Artificial Sequence
  Description of Artificial Sequence:  siNA antisense region
  misc_feature (20)..(21): n stands for thymidine
aacauuuacacgucugcggnn

SEQ ID NO: 3789 - RNA, 21 nt, Artificial Sequence
  Description of Artificial Sequence:  siNA antisense region
  misc_feature (20)..(21): n stands for thymidine
ggaacauuuacacgucugcnn

SEQ ID NO: 3790 - RNA, 21 nt, Artificial Sequence
  Description of Artificial Sequence:  siNA antisense region
  misc_feature (20)..(21): n stands for thymidine
aggaacauuuacacgucugnn

SEQ ID NO: 3791 - RNA, 21 nt, Artificial Sequence
  Description of Artificial Sequence:  siNA antisense region
  misc_feature (20)..(21): n stands for thymidine
uugcaggaacauuuacacgnn

SEQ ID NO: 3792 - RNA, 21 nt, Artificial Sequence
  Description of Artificial Sequence:  siNA antisense region
  misc_feature (20)..(21): n stands for thymidine
guguuuuugcaggaacauunn

SEQ ID NO: 3793 - RNA, 21 nt, Artificial Sequence
  Description of Artificial Sequence:  siNA antisense region
  misc_feature (20)..(21): n stands for thymidine
uguguuuuugcaggaacaunn

SEQ ID NO: 3794 - RNA, 21 nt, Artificial Sequence
  Description of Artificial Sequence:  siNA antisense region
  misc_feature (20)..(21): n stands for thymidine
cgagucuguguuuuugcagnn

SEQ ID NO: 3795 - RNA, 21 nt, Artificial Sequence
  Description of Artificial Sequence:  siNA antisense region
  misc_feature (20)..(21): n stands for thymidine
gcgagucuguguuuuugcann

SEQ ID NO: 3796 - RNA, 21 nt, Artificial Sequence
  Description of Artificial Sequence:  siNA antisense region
  misc_feature (20)..(21): n stands for thymidine
uuaacucaagcugccucgcnn

SEQ ID NO: 3797 - RNA, 21 nt, Artificial Sequence
  Description of Artificial Sequence:  siNA antisense region
  misc_feature (20)..(21): n stands for thymidine
cguuuaacucaagcugccunn

SEQ ID NO: 3798 - RNA, 21 nt, Artificial Sequence
  Description of Artificial Sequence:  siNA antisense region
  misc_feature (20)..(21): n stands for thymidine
ucguuuaacucaagcugccnn

SEQ ID NO: 3799 - RNA, 21 nt, Artificial Sequence
  Description of Artificial Sequence:  siNA antisense region
  misc_feature (20)..(21): n stands for thymidine
uucguuuaacucaagcugcnn

SEQ ID NO: 3800 - RNA, 21 nt, Artificial Sequence
  Description of Artificial Sequence:  siNA antisense region
  misc_feature (20)..(21): n stands for thymidine
guucguuuaacucaagcugnn

SEQ ID NO: 3801 - RNA, 21 nt, Artificial Sequence
  Description of Artificial Sequence:  siNA antisense region
  misc_feature (20)..(21): n stands for thymidine
aucugcaaguacguucguunn

SEQ ID NO: 3802 - RNA, 21 nt, Artificial Sequence
  Description of Artificial Sequence:  siNA antisense region
  misc_feature (20)..(21): n stands for thymidine
caucugcaaguacguucgunn

SEQ ID NO: 3803 - RNA, 21 nt, Artificial Sequence
  Description of Artificial Sequence:  siNA sense region
  misc_feature (1)..(1): 5'-3 attached terminal deoxyabasic moeity
  misc_feature (1)..(1): 2'-deoxy-2'-fluoro
  misc_feature (2)..(2): 2'-deoxy
  misc_feature (3)..(3): 2'-deoxy-2'-fluoro
  misc_feature (4)..(6): 2'-deoxy
  misc_feature (7)..(8): 2'-deoxy-2'-fluoro
  misc_feature (9)..(11): 2'-deoxy
  misc_feature (12)..(15): 2'-deoxy-2'-fluoro
  misc_feature (16)..(16): 2'-deoxy
  misc_feature (17)..(18): 2'-deoxy-2'-fluoro
  misc_feature (19)..(19): 2'-deoxy
  misc_feature (20)..(20): n stands for thymidine
  misc_feature (21)..(21): 3'-3 attached terminal deoxyabasic moeity
ugcggaucaaaccucaccann

SEQ ID NO: 3804 - RNA, 21 nt, Artificial Sequence
  Description of Artificial Sequence:  siNA sense region
  misc_feature (1)..(1): 2'-deoxy
  misc_feature (1)..(1): 5'-3 attached terminal deoxyabasic moeity
  misc_feature (2)..(2): 2'-deoxy-2'-fluoro
  misc_feature (3)..(3): 2'-deoxy
  misc_feature (4)..(4): 2'-deoxy-2'-fluoro
  misc_feature (5)..(7): 2'-deoxy
  misc_feature (8)..(8): 2'-deoxy-2'-fluoro
  misc_feature (9)..(9): 2'-deoxy
  misc_feature (10)..(10): 2'-deoxy-2'-fluoro
  misc_feature (11)..(13): 2'-deoxy
  misc_feature (14)..(15): 2'-deoxy-2'-fluoro
  misc_feature (16)..(19): 2'-deoxy
  misc_feature (20)..(20): n stands for thymidine
  misc_feature (21)..(21): 3'-3 attached terminal deoxyabasic moeity
augugaaugcagaccaaagnn

SEQ ID NO: 3805 - RNA, 21 nt, Artificial Sequence
  Description of Artificial Sequence:  siNA sense region
  misc_feature (1)..(1): 5'-3 attached terminal deoxyabasic moeity
  misc_feature (1)..(1): 2'-deoxy
  misc_feature (2)..(2): 2'-deoxy-2'-fluoro
  misc_feature (3)..(5): 2'-deoxy
  misc_feature (6)..(6): 2'-deoxy-2'-fluoro
  misc_feature (7)..(7): 2'-deoxy
  misc_feature (8)..(8): 2'-deoxy-2'-fluoro
  misc_feature (9)..(11): 2'-deoxy
  misc_feature (12)..(13): 2'-deoxy-2'-fluoro
  misc_feature (14)..(19): 2'-deoxy
  misc_feature (20)..(20): n stands for thymidine
  misc_feature (21)..(21): 3'-3 attached terminal deoxyabasic moeity
gugaaugcagaccaaagaann

SEQ ID NO: 3806 - RNA, 21 nt, Artificial Sequence
  Description of Artificial Sequence:  siNA sense region
  misc_feature (1)..(1): 2'-deoxy
  misc_feature (1)..(1): 5'-3 attached terminal deoxyabasic moeity
  misc_feature (2)..(2): 2'-deoxy-2'-fluoro
  misc_feature (3)..(3): 2'-deoxy
  misc_feature (4)..(8): 2'-deoxy-2'-fluoro
  misc_feature (9)..(9): 2'-deoxy
  misc_feature (10)..(10): 2'-deoxy-2'-fluoro
  misc_feature (11)..(15): 2'-deoxy
  misc_feature (16)..(16): 2'-deoxy-2'-fluoro
  misc_feature (17)..(17): 2'-deoxy
  misc_feature (18)..(18): 2'-deoxy-2'-fluoro
  misc_feature (19)..(19): 2'-deoxy
  misc_feature (20)..(20): n stands for thymidine
  misc_feature (21)..(21): 3'-3 attached terminal deoxyabasic moeity
auguuccugcaaaaacacann

SEQ ID NO: 3807 - RNA, 21 nt, Artificial Sequence
  Description of Artificial Sequence:  siNA sense region
  misc_feature (1)..(1): 5'-3 attached terminal deoxyabasic moeity
  misc_feature (1)..(1): 2'-deoxy-2'-fluoro
  misc_feature (2)..(3): 2'-deoxy
  misc_feature (4)..(6): 2'-deoxy-2'-fluoro
  misc_feature (7)..(9): 2'-deoxy
  misc_feature (10)..(11): 2'-deoxy-2'-fluoro
  misc_feature (12)..(14): 2'-deoxy
  misc_feature (15)..(15): 2'-deoxy-2'-fluoro
  misc_feature (16)..(18): 2'-deoxy
  misc_feature (19)..(19): 2'-deoxy-2'-fluoro
  misc_feature (20)..(20): n stands for thymidine
  misc_feature (21)..(21): 3'-3 attached terminal deoxyabasic moeity
cagcuugaguuaaacgaacnn

SEQ ID NO: 3808 - RNA, 21 nt, Artificial Sequence
  Description of Artificial Sequence:  siNA antisense region
  misc_feature (1)..(1): 2'-deoxy-2'-fluoro
  misc_feature (2)..(3): 2'-O-methyl
  misc_feature (4)..(4): 2'-deoxy-2'-fluoro
  misc_feature (5)..(8): 2'-O-methyl
  misc_feature (9)..(11): 2'-deoxy-2'-fluoro
  misc_feature (12)..(13): 2'-O-methyl
  misc_feature (14)..(16): 2'-deoxy-2'-fluoro
  misc_feature (17)..(17): 2'-O-methyl
  misc_feature (18)..(18): 2'-deoxy-2'-fluoro
  misc_feature (19)..(19): 2'-O-methyl
  misc_feature (20)..(20): Phosphorothioate 3'-Internucleotide Linkage
  misc_feature (21)..(21): n stands for thymidine
uggugagguuugauccgcann

SEQ ID NO: 3809 - RNA, 21 nt, Artificial Sequence
  Description of Artificial Sequence:  siNA antisense region
  misc_feature (1)..(4): 2'-deoxy-2'-fluoro
  misc_feature (5)..(6): 2'-O-methyl
  misc_feature (7)..(9): 2'-deoxy-2'-fluoro
  misc_feature (10)..(10): 2'-O-methyl
  misc_feature (11)..(11): 2'-deoxy-2'-fluoro
  misc_feature (12)..(12): 2'-O-methyl
  misc_feature (13)..(15): 2'-deoxy-2'-fluoro
  misc_feature (16)..(16): 2'-O-methyl
  misc_feature (17)..(17): 2'-deoxy-2'-fluoro
  misc_feature (18)..(18): 2'-O-methyl
  misc_feature (19)..(19): 2'-deoxy-2'-fluoro
  misc_feature (20)..(20): Phosphorothioate 3'-Internucleotide Linkage
  misc_feature (21)..(21): n stands for thymidine
cuuuggucugcauucacaunn

SEQ ID NO: 3810 - RNA, 21 nt, Artificial Sequence
  Description of Artificial Sequence:  siNA antisense region
  misc_feature (1)..(6): 2'-deoxy-2'-fluoro
  misc_feature (7)..(8): 2'-O-methyl
  misc_feature (9)..(11): 2'-deoxy-2'-fluoro
  misc_feature (12)..(12): 2'-O-methyl
  misc_feature (13)..(13): 2'-deoxy-2'-fluoro
  misc_feature (14)..(14): 2'-O-methyl
  misc_feature (15)..(17): 2'-deoxy-2'-fluoro
  misc_feature (18)..(18): 2'-O-methyl
  misc_feature (19)..(19): 2'-deoxy-2'-fluoro
  misc_feature (20)..(20): Phosphorothioate 3'-Internucleotide Linkage
  misc_feature (21)..(21): n stands for thymidine
uucuuuggucugcauucacnn

SEQ ID NO: 3811 - RNA, 21 nt, Artificial Sequence
  Description of Artificial Sequence:  siNA antisense region
  misc_feature (1)..(1): 2'-deoxy-2'-fluoro
  misc_feature (2)..(2): 2'-O-methyl
  misc_feature (3)..(3): 2'-deoxy-2'-fluoro
  misc_feature (4)..(4): 2'-O-methyl
  misc_feature (5)..(9): 2'-deoxy-2'-fluoro
  misc_feature (10)..(10): 2'-O-methyl
  misc_feature (11)..(11): 2'-deoxy-2'-fluoro
  misc_feature (12)..(16): 2'-O-methyl
  misc_feature (17)..(17): 2'-deoxy-2'-fluoro
  misc_feature (18)..(18): 2'-O-methyl
  misc_feature (19)..(19): 2'-deoxy-2'-fluoro
  misc_feature (20)..(20): Phosphorothioate 3'-Internucleotide Linkage
  misc_feature (21)..(21): n stands for thymidine
uguguuuuugcaggaacaunn

SEQ ID NO: 3812 - RNA, 21 nt, Artificial Sequence
  Description of Artificial Sequence:  siNA antisense region
  misc_feature (1)..(1): 2'-O-methyl
  misc_feature (2)..(4): 2'-deoxy-2'-fluoro
  misc_feature (5)..(5): 2'-O-methyl
  misc_feature (6)..(8): 2'-deoxy-2'-fluoro
  misc_feature (9)..(10): 2'-O-methyl
  misc_feature (11)..(13): 2'-deoxy-2'-fluoro
  misc_feature (14)..(16): 2'-O-methyl
  misc_feature (17)..(18): 2'-deoxy-2'-fluoro
  misc_feature (19)..(19): 2'-O-methyl
  misc_feature (20)..(20): Phosphorothioate 3'-Internucleotide Linkage
  misc_feature (21)..(21): n stands for thymidine
guucguuuaacucaagcugnn

SEQ ID NO: 3813 - RNA, 21 nt, Artificial Sequence
  Description of Artificial Sequence:  siNA sense region
  misc_feature (1)..(1): 5'-3 attached terminal deoxyabasic moeity
  misc_feature (20)..(20): n stands for thymidine
  misc_feature (21)..(21): 3'-3 attached terminal deoxyabasic moeity
ugcggaucaaaccucaccann

SEQ ID NO: 3814 - RNA, 21 nt, Artificial Sequence
  Description of Artificial Sequence:  siNA sense region
  misc_feature (1)..(1): 5'-3 attached terminal deoxyabasic moeity
  misc_feature (20)..(20): n stands for thymidine
  misc_feature (21)..(21): 3'-3 attached terminal deoxyabasic moeity
augugaaugcagaccaaagnn

SEQ ID NO: 3815 - RNA, 21 nt, Artificial Sequence
  Description of Artificial Sequence:  siNA sense region
  misc_feature (1)..(1): 5'-3 attached terminal deoxyabasic moeity
  misc_feature (20)..(20): n stands for thymidine
  misc_feature (21)..(21): 3'-3 attached terminal deoxyabasic moeity
gugaaugcagaccaaagaann

SEQ ID NO: 3816 - RNA, 21 nt, Artificial Sequence
  Description of Artificial Sequence:  siNA sense region
  misc_feature (1)..(1): 5'-3 attached terminal deoxyabasic moeity
  misc_feature (20)..(20): n stands for thymidine
  misc_feature (21)..(21): 3'-3 attached terminal deoxyabasic moeity
auguuccugcaaaaacacann

SEQ ID NO: 3817 - RNA, 21 nt, Artificial Sequence
  Description of Artificial Sequence:  siNA sense region
  misc_feature (1)..(1): 5'-3 attached terminal deoxyabasic moeity
  misc_feature (20)..(20): n stands for thymidine
  misc_feature (21)..(21): 3'-3 attached terminal deoxyabasic moeity
cagcuugaguuaaacgaacnn

SEQ ID NO: 3818 - RNA, 21 nt, Artificial Sequence
  Description of Artificial Sequence:  siNA antisense region
  misc_feature (20)..(20): Phosphorothioate 3'-Internucleotide Linkage
  misc_feature (21)..(21): n stands for thymidine
uggugagguuugauccgcann

SEQ ID NO: 3819 - RNA, 21 nt, Artificial Sequence
  Description of Artificial Sequence:  siNA antisense region
  misc_feature (20)..(20): Phosphorothioate 3'-Internucleotide Linkage
  misc_feature (21)..(21): n stands for thymidine
cuuuggucugcauucacaunn

SEQ ID NO: 3820 - RNA, 21 nt, Artificial Sequence
  Description of Artificial Sequence:  siNA antisense region
  misc_feature (20)..(20): Phosphorothioate 3'-Internucleotide Linkage
  misc_feature (21)..(21): n stands for thymidine
uucuuuggucugcauucacnn

SEQ ID NO: 3821 - RNA, 21 nt, Artificial Sequence
  Description of Artificial Sequence:  siNA antisense region
  misc_feature (20)..(20): Phosphorothioate 3'-Internucleotide Linkage
  misc_feature (21)..(21): n stands for thymidine
uguguuuuugcaggaacaunn

SEQ ID NO: 3822 - RNA, 21 nt, Artificial Sequence
  Description of Artificial Sequence:  siNA antisense region
  misc_feature (20)..(20): Phosphorothioate 3'-Internucleotide Linkage
  misc_feature (21)..(21): n stands for thymidine
guucguuuaacucaagcugnn

SEQ ID NO: 3823 - RNA, 21 nt, Artificial Sequence
  Description of Artificial Sequence:  siNA sense region
  misc_feature (1)..(1): 5'-3 attached terminal deoxyabasic moeity
  misc_feature (1)..(1): 2'-deoxy
  misc_feature (2)..(3): 2'-deoxy-2'-fluoro
  misc_feature (4)..(4): 2'-deoxy
  misc_feature (5)..(8): 2'-deoxy-2'-fluoro
  misc_feature (9)..(11): 2'-deoxy
  misc_feature (12)..(13): 2'-deoxy-2'-fluoro
  misc_feature (14)..(16): 2'-deoxy
  misc_feature (17)..(17): 2'-deoxy-2'-fluoro
  misc_feature (18)..(18): 2'-deoxy
  misc_feature (19)..(19): 2'-deoxy-2'-fluoro
  misc_feature (20)..(20): n stands for thymidine
  misc_feature (21)..(21): 3'-3 attached terminal deoxyabasic moeity
accacuccaaacuaggcgunn

SEQ ID NO: 3824 - RNA, 21 nt, Artificial Sequence
  Description of Artificial Sequence:  siNA sense region
  misc_feature (1)..(4): 2'-deoxy
  misc_feature (1)..(1): 5'-3 attached terminal deoxyabasic moeity
  misc_feature (5)..(6): 2'-deoxy-2'-fluoro
  misc_feature (7)..(9): 2'-deoxy
  misc_feature (10)..(10): 2'-deoxy-2'-fluoro
  misc_feature (11)..(11): 2'-deoxy
  misc_feature (12)..(12): 2'-deoxy-2'-fluoro
  misc_feature (13)..(15): 2'-deoxy
  misc_feature (16)..(16): 2'-deoxy-2'-fluoro
  misc_feature (17)..(17): 2'-deoxy
  misc_feature (18)..(18): 2'-deoxy-2'-fluoro
  misc_feature (19)..(19): 2'-deoxy
  misc_feature (20)..(20): n stands for thymidine
  misc_feature (21)..(21): 3'-3 attached terminal deoxyabasic moeity
gaaaccagacguaaguguann

SEQ ID NO: 3825 - RNA, 21 nt, Artificial Sequence
  Description of Artificial Sequence:  siNA sense region
  misc_feature (1)..(1): 5'-3 attached terminal deoxyabasic moeity
  misc_feature (1)..(6): 2'-deoxy
  misc_feature (7)..(8): 2'-deoxy-2'-fluoro
  misc_feature (9)..(11): 2'-deoxy
  misc_feature (12)..(12): 2'-deoxy-2'-fluoro
  misc_feature (13)..(13): 2'-deoxy
  misc_feature (14)..(14): 2'-deoxy-2'-fluoro
  misc_feature (15)..(17): 2'-deoxy
  misc_feature (18)..(18): 2'-deoxy-2'-fluoro
  misc_feature (19)..(19): 2'-deoxy
  misc_feature (20)..(20): n stands for thymidine
  misc_feature (21)..(21): 3'-3 attached terminal deoxyabasic moeity
aagaaaccagacguaagugnn

SEQ ID NO: 3826 - RNA, 21 nt, Artificial Sequence
  Description of Artificial Sequence:  siNA sense region
  misc_feature (1)..(1): 2'-deoxy
  misc_feature (1)..(1): 5'-3 attached terminal deoxyabasic moeity
  misc_feature (2)..(2): 2'-deoxy-2'-fluoro
  misc_feature (3)..(3): 2'-deoxy
  misc_feature (4)..(4): 2'-deoxy-2'-fluoro
  misc_feature (5)..(9): 2'-deoxy
  misc_feature (10)..(10): 2'-deoxy-2'-fluoro
  misc_feature (11)..(11): 2'-deoxy
  misc_feature (12)..(16): 2'-deoxy-2'-fluoro
  misc_feature (17)..(17): 2'-deoxy
  misc_feature (18)..(18): 2'-deoxy-2'-fluoro
  misc_feature (19)..(19): 2'-deoxy
  misc_feature (20)..(20): n stands for thymidine
  misc_feature (21)..(21): 3'-3 attached terminal deoxyabasic moeity
acacaaaaacguccuuguann

SEQ ID NO: 3827 - RNA, 21 nt, Artificial Sequence
  Description of Artificial Sequence:  siNA sense region
  misc_feature (1)..(1): 5'-3 attached terminal deoxyabasic moeity
  misc_feature (1)..(1): 2'-deoxy-2'-fluoro
  misc_feature (2)..(4): 2'-deoxy
  misc_feature (5)..(5): 2'-deoxy-2'-fluoro
  misc_feature (6)..(8): 2'-deoxy
  misc_feature (9)..(10): 2'-deoxy-2'-fluoro
  misc_feature (11)..(13): 2'-deoxy
  misc_feature (14)..(16): 2'-deoxy-2'-fluoro
  misc_feature (17)..(18): 2'-deoxy
  misc_feature (19)..(19): 2'-deoxy-2'-fluoro
  misc_feature (20)..(20): n stands for thymidine
  misc_feature (21)..(21): 3'-3 attached terminal deoxyabasic moeity
caagcaaauugaguucgacnn

SEQ ID NO: 3828 - RNA, 21 nt, Artificial Sequence
  Description of Artificial Sequence:  siNA antisense region
  misc_feature (1)..(1): 2'-O-methyl
  misc_feature (2)..(2): 2'-deoxy-2'-fluoro
  misc_feature (3)..(3): 2'-O-methyl
  misc_feature (4)..(6): 2'-deoxy-2'-fluoro
  misc_feature (7)..(8): 2'-O-methyl
  misc_feature (9)..(11): 2'-deoxy-2'-fluoro
  misc_feature (12)..(15): 2'-O-methyl
  misc_feature (16)..(16): 2'-deoxy-2'-fluoro
  misc_feature (17)..(18): 2'-O-methyl
  misc_feature (19)..(19): 2'-deoxy-2'-fluoro
  misc_feature (20)..(20): Phosphorothioate 3'-Internucleotide Linkage
  misc_feature (21)..(21): n stands for thymidine
acgccuaguuuggaguggunn

SEQ ID NO: 3829 - RNA, 21 nt, Artificial Sequence
  Description of Artificial Sequence:  siNA antisense region
  misc_feature (1)..(1): 2'-deoxy-2'-fluoro
  misc_feature (2)..(2): 2'-O-methyl
  misc_feature (3)..(3): 2'-deoxy-2'-fluoro
  misc_feature (4)..(4): 2'-O-methyl
  misc_feature (5)..(7): 2'-deoxy-2'-fluoro
  misc_feature (8)..(8): 2'-O-methyl
  misc_feature (9)..(9): 2'-deoxy-2'-fluoro
  misc_feature (10)..(10): 2'-O-methyl
  misc_feature (11)..(13): 2'-deoxy-2'-fluoro
  misc_feature (14)..(15): 2'-O-methyl
  misc_feature (16)..(19): 2'-deoxy-2'-fluoro
  misc_feature (20)..(20): Phosphorothioate 3'-Internucleotide Linkage
  misc_feature (21)..(21): n stands for thymidine
uacacuuacgucugguuucnn

SEQ ID NO: 3830 - RNA, 21 nt, Artificial Sequence
  Description of Artificial Sequence:  siNA antisense region
  misc_feature (1)..(1): 2'-deoxy-2'-fluoro
  misc_feature (2)..(2): 2'-O-methyl
  misc_feature (3)..(5): 2'-deoxy-2'-fluoro
  misc_feature (6)..(6): 2'-O-methyl
  misc_feature (7)..(7): 2'-deoxy-2'-fluoro
  misc_feature (8)..(8): 2'-O-methyl
  misc_feature (9)..(11): 2'-deoxy-2'-fluoro
  misc_feature (12)..(13): 2'-O-methyl
  misc_feature (14)..(19): 2'-deoxy-2'-fluoro
  misc_feature (20)..(20): Phosphorothioate 3'-Internucleotide Linkage
  misc_feature (21)..(21): n stands for thymidine
cacuuacgucugguuucuunn

SEQ ID NO: 3831 - RNA, 21 nt, Artificial Sequence
  Description of Artificial Sequence:  siNA antisense region
  misc_feature (1)..(1): 2'-deoxy-2'-fluoro
  misc_feature (2)..(2): 2'-O-methyl
  misc_feature (3)..(3): 2'-deoxy-2'-fluoro
  misc_feature (4)..(8): 2'-O-methyl
  misc_feature (9)..(9): 2'-deoxy-2'-fluoro
  misc_feature (10)..(10): 2'-O-methyl
  misc_feature (11)..(15): 2'-deoxy-2'-fluoro
  misc_feature (16)..(16): 2'-O-methyl
  misc_feature (17)..(17): 2'-deoxy-2'-fluoro
  misc_feature (18)..(18): 2'-O-methyl
  misc_feature (19)..(19): 2'-deoxy-2'-fluoro
  misc_feature (20)..(20): Phosphorothioate 3'-Internucleotide Linkage
  misc_feature (21)..(21): n stands for thymidine
uacaaggacguuuuugugunn

SEQ ID NO: 3832 - RNA, 21 nt, Artificial Sequence
  Description of Artificial Sequence:  siNA antisense region
  misc_feature (1)..(1): 2'-O-methyl
  misc_feature (2)..(3): 2'-deoxy-2'-fluoro
  misc_feature (4)..(6): 2'-O-methyl
  misc_feature (7)..(9): 2'-deoxy-2'-fluoro
  misc_feature (10)..(11): 2'-O-methyl
  misc_feature (12)..(14): 2'-deoxy-2'-fluoro
  misc_feature (15)..(15): 2'-O-methyl
  misc_feature (16)..(18): 2'-deoxy-2'-fluoro
  misc_feature (19)..(19): 2'-O-methyl
  misc_feature (20)..(20): Phosphorothioate 3'-Internucleotide Linkage
  misc_feature (21)..(21): n stands for thymidine
gucgaacucaauuugcuugnn

SEQ ID NO: 3833 - RNA, 21 nt, Artificial Sequence
  Description of Artificial Sequence:  siNA sense region
  misc_feature (1)..(1): 5'-3 attached terminal deoxyabasic moeity
  misc_feature (20)..(20): n stands for thymidine
  misc_feature (21)..(21): 3'-3 attached terminal deoxyabasic moeity
accacuccaaacuaggcgunn

SEQ ID NO: 3834 - RNA, 21 nt, Artificial Sequence
  Description of Artificial Sequence:  siNA sense region
  misc_feature (1)..(1): 5'-3 attached terminal deoxyabasic moeity
  misc_feature (20)..(20): n stands for thymidine
  misc_feature (21)..(21): 3'-3 attached terminal deoxyabasic moeity
gaaaccagacguaaguguann

SEQ ID NO: 3835 - RNA, 21 nt, Artificial Sequence
  Description of Artificial Sequence:  siNA sense region
  misc_feature (1)..(1): 5'-3 attached terminal deoxyabasic moeity
  misc_feature (20)..(20): n stands for thymidine
  misc_feature (21)..(21): 3'-3 attached terminal deoxyabasic moeity
aagaaaccagacguaagugnn

SEQ ID NO: 3836 - RNA, 21 nt, Artificial Sequence
  Description of Artificial Sequence:  siNA sense region
  misc_feature (1)..(1): 5'-3 attached terminal deoxyabasic moeity
  misc_feature (20)..(20): n stands for thymidine
  misc_feature (21)..(21): 3'-3 attached terminal deoxyabasic moeity
acacaaaaacguccuuguann

SEQ ID NO: 3837 - RNA, 21 nt, Artificial Sequence
  Description of Artificial Sequence:  siNA sense region
  misc_feature (1)..(1): 5'-3 attached terminal deoxyabasic moeity
  misc_feature (20)..(20): n stands for thymidine
  misc_feature (21)..(21): 3'-3 attached terminal deoxyabasic moeity
caagcaaauugaguucgacnn

SEQ ID NO: 3838 - RNA, 21 nt, Artificial Sequence
  Description of Artificial Sequence:  siNA antisense region
  misc_feature (20)..(20): Phosphorothioate 3'-Internucleotide Linkage
  misc_feature (21)..(21): n stands for thymidine
acgccuaguuuggaguggunn

SEQ ID NO: 3839 - RNA, 21 nt, Artificial Sequence
  Description of Artificial Sequence:  siNA antisense region
  misc_feature (20)..(20): Phosphorothioate 3'-Internucleotide Linkage
  misc_feature (21)..(21): n stands for thymidine
uacacuuacgucugguuucnn

SEQ ID NO: 3840 - RNA, 21 nt, Artificial Sequence
  Description of Artificial Sequence:  siNA antisense region
  misc_feature (20)..(20): Phosphorothioate 3'-Internucleotide Linkage
  misc_feature (21)..(21): n stands for thymidine
cacuuacgucugguuucuunn

SEQ ID NO: 3841 - RNA, 21 nt, Artificial Sequence
  Description of Artificial Sequence:  siNA antisense region
  misc_feature (20)..(20): Phosphorothioate 3'-Internucleotide Linkage
  misc_feature (21)..(21): n stands for thymidine
uacaaggacguuuuugugunn

SEQ ID NO: 3842 - RNA, 21 nt, Artificial Sequence
  Description of Artificial Sequence:  siNA antisense region
  misc_feature (20)..(20): Phosphorothioate 3'-Internucleotide Linkage
  misc_feature (21)..(21): n stands for thymidine
gucgaacucaauuugcuugnn

SEQ ID NO: 3843 - RNA, 21 nt, Artificial Sequence
  Description of Artificial Sequence:  siNA sense region
  misc_feature (1)..(1): 5'-3 attached terminal deoxyabasic moeity
  misc_feature (20)..(20): n stands for thymidine
  misc_feature (21)..(21): 3'-3 attached terminal deoxyabasic moeity
ugugaaugcagaccaaagann

SEQ ID NO: 3844 - RNA, 21 nt, Artificial Sequence
  Description of Artificial Sequence:  siNA sense region
  misc_feature (1)..(1): 5'-3 attached terminal deoxyabasic moeity
  misc_feature (20)..(20): n stands for thymidine
  misc_feature (21)..(21): 3'-3 attached terminal deoxyabasic moeity
gaaugcagaccaaagaaagnn

SEQ ID NO: 3845 - RNA, 21 nt, Artificial Sequence
  Description of Artificial Sequence:  siNA antisense region
  misc_feature (20)..(20): Phosphorothioate 3'-Internucleotide Linkage
  misc_feature (21)..(21): n stands for thymidine
ucuuuggucugcauucacann

SEQ ID NO: 3846 - RNA, 21 nt, Artificial Sequence
  Description of Artificial Sequence:  siNA antisense region
  misc_feature (20)..(20): Phosphorothioate 3'-Internucleotide Linkage
  misc_feature (21)..(21): n stands for thymidine
cuuucuuuggucugcauucnn

SEQ ID NO: 3847 - RNA, 21 nt, Artificial Sequence
  Description of Artificial Sequence:  siNA sense region
  misc_feature (1)..(1): 5'-3 attached terminal deoxyabasic moeity
  misc_feature (1)..(1): 2'-deoxy-2'-fluoro
  misc_feature (2)..(2): 2'-deoxy
  misc_feature (3)..(3): 2'-deoxy-2'-fluoro
  misc_feature (4)..(6): 2'-deoxy
  misc_feature (7)..(7): 2'-deoxy-2'-fluoro
  misc_feature (8)..(8): 2'-deoxy
  misc_feature (9)..(9): 2'-deoxy-2'-fluoro
  misc_feature (10)..(12): 2'-deoxy
  misc_feature (13)..(14): 2'-deoxy-2'-fluoro
  misc_feature (15)..(19): 2'-deoxy
  misc_feature (20)..(20): n stands for thymidine
  misc_feature (21)..(21): 3'-3 attached terminal deoxyabasic moeity
ugugaaugcagaccaaagann

SEQ ID NO: 3848 - RNA, 21 nt, Artificial Sequence
  Description of Artificial Sequence:  siNA sense region
  misc_feature (1)..(3): 2'-deoxy
  misc_feature (1)..(1): 5'-3 attached terminal deoxyabasic moeity
  misc_feature (4)..(4): 2'-deoxy-2'-fluoro
  misc_feature (5)..(5): 2'-deoxy
  misc_feature (6)..(6): 2'-deoxy-2'-fluoro
  misc_feature (7)..(9): 2'-deoxy
  misc_feature (10)..(11): 2'-deoxy-2'-fluoro
  misc_feature (12)..(19): 2'-deoxy
  misc_feature (20)..(20): n stands for thymidine
  misc_feature (21)..(21): 3'-3 attached terminal deoxyabasic moeity
gaaugcagaccaaagaaagnn

SEQ ID NO: 3849 - RNA, 21 nt, Artificial Sequence
  Description of Artificial Sequence:  siNA antisense region
  misc_feature (1)..(5): 2'-deoxy-2'-fluoro
  misc_feature (6)..(7): 2'-O-methyl
  misc_feature (8)..(10): 2'-deoxy-2'-fluoro
  misc_feature (11)..(11): 2'-O-methyl
  misc_feature (12)..(12): 2'-deoxy-2'-fluoro
  misc_feature (13)..(13): 2'-O-methyl
  misc_feature (14)..(16): 2'-deoxy-2'-fluoro
  misc_feature (17)..(17): 2'-O-methyl
  misc_feature (18)..(18): 2'-deoxy-2'-fluoro
  misc_feature (19)..(19): 2'-O-methyl
  misc_feature (20)..(20): Phosphorothioate 3'-Internucleotide Linkage
  misc_feature (21)..(21): n stands for thymidine
ucuuuggucugcauucacann

SEQ ID NO: 3850 - RNA, 21 nt, Artificial Sequence
  Description of Artificial Sequence:  siNA antisense region
  misc_feature (1)..(8): 2'-deoxy-2'-fluoro
  misc_feature (9)..(10): 2'-O-methyl
  misc_feature (11)..(13): 2'-deoxy-2'-fluoro
  misc_feature (14)..(14): 2'-O-methyl
  misc_feature (15)..(15): 2'-deoxy-2'-fluoro
  misc_feature (16)..(16): 2'-O-methyl
  misc_feature (17)..(19): 2'-deoxy-2'-fluoro
  misc_feature (20)..(20): Phosphorothioate 3'-Internucleotide Linkage
  misc_feature (21)..(21): n stands for thymidine
cuuucuuuggucugcauucnn

SEQ ID NO: 3851 - RNA, 21 nt, Artificial Sequence
  Description of Artificial Sequence:  siNA sense region
  misc_feature (1)..(1): 5'-3 attached terminal deoxyabasic moeity
  misc_feature (20)..(20): n stands for thymidine
  misc_feature (21)..(21): 3'-3 attached terminal deoxyabasic moeity
augaggaccuucuacaggunn

SEQ ID NO: 3852 - RNA, 21 nt, Artificial Sequence
  Description of Artificial Sequence:  siNA sense region
  misc_feature (1)..(1): 5'-3 attached terminal deoxyabasic moeity
  misc_feature (20)..(20): n stands for thymidine
  misc_feature (21)..(21): 3'-3 attached terminal deoxyabasic moeity
caugaggaccuucuacaggnn

SEQ ID NO: 3853 - RNA, 21 nt, Artificial Sequence
  Description of Artificial Sequence:  siNA sense region
  misc_feature (1)..(1): 5'-3 attached terminal deoxyabasic moeity
  misc_feature (20)..(20): n stands for thymidine
  misc_feature (21)..(21): 3'-3 attached terminal deoxyabasic moeity
agaaaccagacguaagugunn

SEQ ID NO: 3854 - RNA, 21 nt, Artificial Sequence
  Description of Artificial Sequence:  siNA sense region
  misc_feature (1)..(1): 5'-3 attached terminal deoxyabasic moeity
  misc_feature (20)..(20): n stands for thymidine
  misc_feature (21)..(21): 3'-3 attached terminal deoxyabasic moeity
gaaagaaaccagacguaagnn

SEQ ID NO: 3855 - RNA, 21 nt, Artificial Sequence
  Description of Artificial Sequence:  siNA antisense region
  misc_feature (20)..(20): Phosphorothioate 3'-Internucleotide Linkage
  misc_feature (21)..(21): n stands for thymidine
accuguagaagguccucaunn

SEQ ID NO: 3856 - RNA, 21 nt, Artificial Sequence
  Description of Artificial Sequence:  siNA antisense region
  misc_feature (20)..(20): Phosphorothioate 3'-Internucleotide Linkage
  misc_feature (21)..(21): n stands for thymidine
ccuguagaagguccucaugnn

SEQ ID NO: 3857 - RNA, 21 nt, Artificial Sequence
  Description of Artificial Sequence:  siNA antisense region
  misc_feature (20)..(20): Phosphorothioate 3'-Internucleotide Linkage
  misc_feature (21)..(21): n stands for thymidine
acacuuacgucugguuucunn

SEQ ID NO: 3858 - RNA, 21 nt, Artificial Sequence
  Description of Artificial Sequence:  siNA antisense region
  misc_feature (20)..(20): Phosphorothioate 3'-Internucleotide Linkage
  misc_feature (21)..(21): n stands for thymidine
cuuacgucugguuucuuucnn

SEQ ID NO: 3859 - RNA, 21 nt, Artificial Sequence
  Description of Artificial Sequence:  siNA sense region
  misc_feature (1)..(1): 5'-3 attached terminal deoxyabasic moeity
  misc_feature (1)..(1): 2'-deoxy
  misc_feature (2)..(2): 2'-deoxy-2'-fluoro
  misc_feature (3)..(7): 2'-deoxy
  misc_feature (8)..(13): 2'-deoxy-2'-fluoro
  misc_feature (14)..(14): 2'-deoxy
  misc_feature (15)..(15): 2'-deoxy-2'-fluoro
  misc_feature (16)..(18): 2'-deoxy
  misc_feature (19)..(19): 2'-deoxy-2'-fluoro
  misc_feature (20)..(20): n stands for thymidine
  misc_feature (21)..(21): 3'-3 attached terminal deoxyabasic moeity
augaggaccuucuacaggunn

SEQ ID NO: 3860 - RNA, 21 nt, Artificial Sequence
  Description of Artificial Sequence:  siNA sense region
  misc_feature (1)..(1): 2'-deoxy-2'-fluoro
  misc_feature (1)..(1): 5'-3 attached terminal deoxyabasic moeity
  misc_feature (2)..(2): 2'-deoxy
  misc_feature (3)..(3): 2'-deoxy-2'-fluoro
  misc_feature (4)..(8): 2'-deoxy
  misc_feature (9)..(14): 2'-deoxy-2'-fluoro
  misc_feature (15)..(15): 2'-deoxy
  misc_feature (16)..(16): 2'-deoxy-2'-fluoro
  misc_feature (17)..(19): 2'-deoxy
  misc_feature (20)..(20): n stands for thymidine
  misc_feature (21)..(21): 3'-3 attached terminal deoxyabasic moeity
caugaggaccuucuacaggnn

SEQ ID NO: 3861 - RNA, 21 nt, Artificial Sequence
  Description of Artificial Sequence:  siNA sense region
  misc_feature (1)..(1): 5'-3 attached terminal deoxyabasic moeity
  misc_feature (1)..(5): 2'-deoxy
  misc_feature (6)..(7): 2'-deoxy-2'-fluoro
  misc_feature (8)..(10): 2'-deoxy
  misc_feature (11)..(11): 2'-deoxy-2'-fluoro
  misc_feature (12)..(12): 2'-deoxy
  misc_feature (13)..(13): 2'-deoxy-2'-fluoro
  misc_feature (14)..(16): 2'-deoxy
  misc_feature (17)..(17): 2'-deoxy-2'-fluoro
  misc_feature (18)..(18): 2'-deoxy
  misc_feature (19)..(19): 2'-deoxy-2'-fluoro
  misc_feature (20)..(20): n stands for thymidine
  misc_feature (21)..(21): 3'-3 attached terminal deoxyabasic moeity
agaaaccagacguaagugunn

SEQ ID NO: 3862 - RNA, 21 nt, Artificial Sequence
  Description of Artificial Sequence:  siNA sense region
  misc_feature (1)..(8): 2'-deoxy
  misc_feature (1)..(1): 5'-3 attached terminal deoxyabasic moeity
  misc_feature (9)..(10): 2'-deoxy-2'-fluoro
  misc_feature (11)..(13): 2'-deoxy
  misc_feature (14)..(14): 2'-deoxy-2'-fluoro
  misc_feature (15)..(15): 2'-deoxy
  misc_feature (16)..(16): 2'-deoxy-2'-fluoro
  misc_feature (17)..(19): 2'-deoxy
  misc_feature (20)..(20): n stands for thymidine
  misc_feature (21)..(21): 3'-3 attached terminal deoxyabasic moeity
gaaagaaaccagacguaagnn

SEQ ID NO: 3863 - RNA, 21 nt, Artificial Sequence
  Description of Artificial Sequence:  siNA antisense region
  misc_feature (1)..(1): 2'-O-methyl
  misc_feature (2)..(4): 2'-deoxy-2'-fluoro
  misc_feature (5)..(5): 2'-O-methyl
  misc_feature (6)..(6): 2'-deoxy-2'-fluoro
  misc_feature (7)..(12): 2'-O-methyl
  misc_feature (13)..(17): 2'-deoxy-2'-fluoro
  misc_feature (18)..(18): 2'-O-methyl
  misc_feature (19)..(19): 2'-deoxy-2'-fluoro
  misc_feature (20)..(20): Phosphorothioate 3'-Internucleotide Linkage
  misc_feature (21)..(21): n stands for thymidine
accuguagaagguccucaunn

SEQ ID NO: 3864 - RNA, 21 nt, Artificial Sequence
  Description of Artificial Sequence:  siNA antisense region
  misc_feature (1)..(3): 2'-deoxy-2'-fluoro
  misc_feature (4)..(4): 2'-O-methyl
  misc_feature (5)..(5): 2'-deoxy-2'-fluoro
  misc_feature (6)..(11): 2'-O-methyl
  misc_feature (12)..(16): 2'-deoxy-2'-fluoro
  misc_feature (17)..(17): 2'-O-methyl
  misc_feature (18)..(18): 2'-deoxy-2'-fluoro
  misc_feature (19)..(19): 2'-O-methyl
  misc_feature (20)..(20): Phosphorothioate 3'-Internucleotide Linkage
  misc_feature (21)..(21): n stands for thymidine
ccuguagaagguccucaugnn

SEQ ID NO: 3865 - RNA, 21 nt, Artificial Sequence
  Description of Artificial Sequence:  siNA antisense region
  misc_feature (1)..(1): 2'-O-methyl
  misc_feature (2)..(2): 2'-deoxy-2'-fluoro
  misc_feature (3)..(3): 2'-O-methyl
  misc_feature (4)..(6): 2'-deoxy-2'-fluoro
  misc_feature (7)..(7): 2'-O-methyl
  misc_feature (8)..(8): 2'-deoxy-2'-fluoro
  misc_feature (9)..(9): 2'-O-methyl
  misc_feature (10)..(12): 2'-deoxy-2'-fluoro
  misc_feature (13)..(14): 2'-O-methyl
  misc_feature (15)..(19): 2'-deoxy-2'-fluoro
  misc_feature (20)..(20): Phosphorothioate 3'-Internucleotide Linkage
  misc_feature (21)..(21): n stands for thymidine
acacuuacgucugguuucunn

SEQ ID NO: 3866 - RNA, 21 nt, Artificial Sequence
  Description of Artificial Sequence:  siNA antisense region
  misc_feature (1)..(3): 2'-deoxy-2'-fluoro
  misc_feature (4)..(4): 2'-O-methyl
  misc_feature (5)..(5): 2'-deoxy-2'-fluoro
  misc_feature (6)..(6): 2'-O-methyl
  misc_feature (7)..(9): 2'-deoxy-2'-fluoro
  misc_feature (10)..(11): 2'-O-methyl
  misc_feature (12)..(19): 2'-deoxy-2'-fluoro
  misc_feature (20)..(20): Phosphorothioate 3'-Internucleotide Linkage
  misc_feature (21)..(21): n stands for thymidine
cuuacgucugguuucuuucnn

SEQ ID NO: 3867 - RNA, 21 nt, Artificial Sequence
  Description of Artificial Sequence:  siNA sense region
  misc_feature (20)..(21): n stands for thymidine
accucaccaaggccagcacnn

SEQ ID NO: 3868 - RNA, 21 nt, Artificial Sequence
  Description of Artificial Sequence:  siNA antisense region
  misc_feature (20)..(21): n stands for thymidine
gugcuggccuuggugaggunn

SEQ ID NO: 3869 - RNA, 21 nt, Artificial Sequence
  Description of Artificial Sequence:  siNA antisense region
  misc_feature (1)..(1): 5'-3 attached terminal deoxyabasic moeity
  misc_feature (2)..(5): 2'-deoxy-2'-fluoro
  misc_feature (7)..(8): 2'-deoxy-2'-fluoro
  misc_feature (13)..(14): 2'-deoxy-2'-fluoro
  misc_feature (17)..(17): 2'-deoxy-2'-fluoro
  misc_feature (19)..(19): 2'-deoxy-2'-fluoro
  misc_feature (20)..(20): n stands for thymidine
  misc_feature (21)..(21): 3'-3 attached terminal deoxyabasic moeity
accucaccaaggccagcacnn

SEQ ID NO: 3870 - RNA, 21 nt, Artificial Sequence
  Description of Artificial Sequence:  siNA antisense region
  misc_feature (2)..(2): 2'-deoxy-2'-fluoro
  misc_feature (4)..(5): 2'-deoxy-2'-fluoro
  misc_feature (8)..(11): 2'-deoxy-2'-fluoro
  misc_feature (14)..(14): 2'-deoxy-2'-fluoro
  misc_feature (19)..(19): 2'-deoxy-2'-fluoro
  misc_feature (20)..(20): Phosphorothioate 3'-Internucleotide Linkage
  misc_feature (21)..(21): n stands for thymidine
gugcuggccuuggugaggunn

SEQ ID NO: 3871 - RNA, 21 nt, Artificial Sequence
  Description of Artificial Sequence:  siNA sense region
  misc_feature (1)..(1): 5'-3 attached terminal deoxyabasic moeity
  misc_feature (20)..(20): n stands for thymidine
  misc_feature (21)..(21): 3'-3 attached terminal deoxyabasic moeity
accucaccaaggccagcacnn

SEQ ID NO: 3872 - RNA, 21 nt, Artificial Sequence
  Description of Artificial Sequence:  siNA antisense region
  misc_feature (20)..(20): Phosphorothioate 3'-Internucleotide Linkage
  misc_feature (21)..(21): n stands for thymidine
gugcuggccuuggugaggunn

SEQ ID NO: 3873 - RNA, 21 nt, Artificial Sequence
  Description of Artificial Sequence:  siNA sense region
  misc_feature (20)..(21): n stands for thymidine
cacgaccggaaccacuccann

SEQ ID NO: 3874 - RNA, 21 nt, Artificial Sequence
  Description of Artificial Sequence:  siNA antisense region
  misc_feature (20)..(21): n stands for thymidine
uggagugguuccggucgugnn

SEQ ID NO: 3875 - RNA, 21 nt, Artificial Sequence
  Description of Artificial Sequence:  siNA sense region
  misc_feature (1)..(1): 5'-3 attached terminal deoxyabasic moeity
  misc_feature (1)..(1): 2'-deoxy-2'-fluoro
  misc_feature (3)..(3): 2'-deoxy-2'-fluoro
  misc_feature (6)..(7): 2'-deoxy-2'-fluoro
  misc_feature (12)..(13): 2'-deoxy-2'-fluoro
  misc_feature (15)..(18): 2'-deoxy-2'-fluoro
  misc_feature (20)..(20): n stands for thymidine
  misc_feature (21)..(21): 3'-3 attached terminal deoxyabasic moeity
cacgaccggaaccacuccann

SEQ ID NO: 3876 - RNA, 21 nt, Artificial Sequence
  Description of Artificial Sequence:  siNA antisense region
  misc_feature (1)..(1): 2'-deoxy-2'-fluoro
  misc_feature (2)..(5): 2'-O-methyl
  misc_feature (6)..(6): 2'-deoxy-2'-fluoro
  misc_feature (7)..(8): 2'-O-methyl
  misc_feature (9)..(12): 2'-deoxy-2'-fluoro
  misc_feature (13)..(14): 2'-O-methyl
  misc_feature (15)..(16): 2'-deoxy-2'-fluoro
  misc_feature (17)..(17): 2'-O-methyl
  misc_feature (18)..(18): 2'-deoxy-2'-fluoro
  misc_feature (19)..(19): 2'-O-methyl
  misc_feature (20)..(20): Phosphorothioate 3'-Internucleotide Linkage
  misc_feature (21)..(21): n stands for thymidine
uggagugguuccggucgugnn

SEQ ID NO: 3877 - RNA, 21 nt, Artificial Sequence
  Description of Artificial Sequence:  siNA sense region
  misc_feature (1)..(1): 5'-3 attached terminal deoxyabasic moeity
  misc_feature (20)..(20): n stands for thymidine
  misc_feature (21)..(21): 3'-3 attached terminal deoxyabasic moeity
cacgaccggaaccacuccann

SEQ ID NO: 3878 - RNA, 21 nt, Artificial Sequence
  Description of Artificial Sequence:  siNA antisense region
  misc_feature (20)..(20): Phosphorothioate 3'-Internucleotide Linkage
  misc_feature (21)..(21): n stands for thymidine
uggagugguuccggucgugnn

SEQ ID NO: 3879 - RNA, 21 nt, Artificial Sequence
  Description of Artificial Sequence:  siNA sense region
  misc_feature (20)..(21): n stands for thymidine
agagacggggucagagagann

SEQ ID NO: 3880 - RNA, 21 nt, Artificial Sequence
  Description of Artificial Sequence:  siNA sense region
  misc_feature (20)..(21): n stands for thymidine
agcauuuguuuguacaagann

SEQ ID NO: 3881 - RNA, 21 nt, Artificial Sequence
  Description of Artificial Sequence:  siNA antisense region
  misc_feature (20)..(21): n stands for thymidine
ucucucugaccccgucucunn

SEQ ID NO: 3882 - RNA, 21 nt, Artificial Sequence
  Description of Artificial Sequence:  siNA antisense region
  misc_feature (20)..(21): n stands for thymidine
ucuuguacaaacaaaugcunn

SEQ ID NO: 3883 - RNA, 21 nt, Artificial Sequence
  Description of Artificial Sequence:  siNA sense region
  misc_feature (20)..(21): n stands for thymidine
ccucuucuuuuuucuuaaann

SEQ ID NO: 3884 - RNA, 21 nt, Artificial Sequence
  Description of Artificial Sequence:  siNA sense region
  misc_feature (20)..(21): n stands for thymidine
cucuucuuuuuucuuaaacnn

SEQ ID NO: 3885 - RNA, 21 nt, Artificial Sequence
  Description of Artificial Sequence:  siNA sense region
  misc_feature (20)..(21): n stands for thymidine
ucuucuuuuuucuuaaacann

SEQ ID NO: 3886 - RNA, 21 nt, Artificial Sequence
  Description of Artificial Sequence:  siNA sense region
  misc_feature (20)..(21): n stands for thymidine
uucuuuuuucuuaaacauunn

SEQ ID NO: 3887 - RNA, 21 nt, Artificial Sequence
  Description of Artificial Sequence:  siNA sense region
  misc_feature (20)..(21): n stands for thymidine
uuuuuucuuaaacauuuuunn

SEQ ID NO: 3888 - RNA, 21 nt, Artificial Sequence
  Description of Artificial Sequence:  siNA sense region
  misc_feature (20)..(21): n stands for thymidine
uuuucuuaaacauuuuuuunn

SEQ ID NO: 3889 - RNA, 21 nt, Artificial Sequence
  Description of Artificial Sequence:  siNA sense region
  misc_feature (20)..(21): n stands for thymidine
uuucuuaaacauuuuuuuunn

SEQ ID NO: 3890 - RNA, 21 nt, Artificial Sequence
  Description of Artificial Sequence:  siNA sense region
  misc_feature (20)..(21): n stands for thymidine
cauuuuuuuuuaaaacugunn

SEQ ID NO: 3891 - RNA, 21 nt, Artificial Sequence
  Description of Artificial Sequence:  siNA sense region
  misc_feature (20)..(21): n stands for thymidine
uuuuuaaaacuguauuguunn

SEQ ID NO: 3892 - RNA, 21 nt, Artificial Sequence
  Description of Artificial Sequence:  siNA sense region
  misc_feature (20)..(21): n stands for thymidine
uuuuaaaacuguauuguuunn

SEQ ID NO: 3893 - RNA, 21 nt, Artificial Sequence
  Description of Artificial Sequence:  siNA sense region
  misc_feature (20)..(21): n stands for thymidine
aaaacuguauuguuucucgnn

SEQ ID NO: 3894 - RNA, 21 nt, Artificial Sequence
  Description of Artificial Sequence:  siNA sense region
  misc_feature (20)..(21): n stands for thymidine
uguuucucguuuuaauuuann

SEQ ID NO: 3895 - RNA, 21 nt, Artificial Sequence
  Description of Artificial Sequence:  siNA sense region
  misc_feature (20)..(21): n stands for thymidine
auuuuugcuugccauucccnn

SEQ ID NO: 3896 - RNA, 21 nt, Artificial Sequence
  Description of Artificial Sequence:  siNA sense region
  misc_feature (20)..(21): n stands for thymidine
cccacuugaaucgggccgann

SEQ ID NO: 3897 - RNA, 21 nt, Artificial Sequence
  Description of Artificial Sequence:  siNA sense region
  misc_feature (20)..(21): n stands for thymidine
ccacuugaaucgggccgacnn

SEQ ID NO: 3898 - RNA, 21 nt, Artificial Sequence
  Description of Artificial Sequence:  siNA sense region
  misc_feature (20)..(21): n stands for thymidine
ccagagagaagucgaggaann

SEQ ID NO: 3899 - RNA, 21 nt, Artificial Sequence
  Description of Artificial Sequence:  siNA sense region
  misc_feature (20)..(21): n stands for thymidine
cagagagaagucgaggaagnn

SEQ ID NO: 3900 - RNA, 21 nt, Artificial Sequence
  Description of Artificial Sequence:  siNA sense region
  misc_feature (20)..(21): n stands for thymidine
cagagagagcgcgcgggcgnn

SEQ ID NO: 3901 - RNA, 21 nt, Artificial Sequence
  Description of Artificial Sequence:  siNA sense region
  misc_feature (20)..(21): n stands for thymidine
agcugaccagucgcgcugann

SEQ ID NO: 3902 - RNA, 21 nt, Artificial Sequence
  Description of Artificial Sequence:  siNA sense region
  misc_feature (20)..(21): n stands for thymidine
ccggagcccgcgcccggagnn

SEQ ID NO: 3903 - RNA, 21 nt, Artificial Sequence
  Description of Artificial Sequence:  siNA sense region
  misc_feature (20)..(21): n stands for thymidine
cggagcccgcgcccggaggnn

SEQ ID NO: 3904 - RNA, 21 nt, Artificial Sequence
  Description of Artificial Sequence:  siNA sense region
  misc_feature (20)..(21): n stands for thymidine
ggagcccgcgcccggaggcnn

SEQ ID NO: 3905 - RNA, 21 nt, Artificial Sequence
  Description of Artificial Sequence:  siNA sense region
  misc_feature (20)..(21): n stands for thymidine
cugaaacuuuucguccaacnn

SEQ ID NO: 3906 - RNA, 21 nt, Artificial Sequence
  Description of Artificial Sequence:  siNA sense region
  misc_feature (20)..(21): n stands for thymidine
ugaaacuuuucguccaacunn

SEQ ID NO: 3907 - RNA, 21 nt, Artificial Sequence
  Description of Artificial Sequence:  siNA sense region
  misc_feature (20)..(21): n stands for thymidine
gaaacuuuucguccaacuunn

SEQ ID NO: 3908 - RNA, 21 nt, Artificial Sequence
  Description of Artificial Sequence:  siNA sense region
  misc_feature (20)..(21): n stands for thymidine
cuuuucguccaacuucuggnn

SEQ ID NO: 3909 - RNA, 21 nt, Artificial Sequence
  Description of Artificial Sequence:  siNA sense region
  misc_feature (20)..(21): n stands for thymidine
ucugggcuguucucgcuucnn

SEQ ID NO: 3910 - RNA, 21 nt, Artificial Sequence
  Description of Artificial Sequence:  siNA sense region
  misc_feature (20)..(21): n stands for thymidine
ugggcuguucucgcuucggnn

SEQ ID NO: 3911 - RNA, 21 nt, Artificial Sequence
  Description of Artificial Sequence:  siNA sense region
  misc_feature (20)..(21): n stands for thymidine
ggaggagccgugguccgcgnn

SEQ ID NO: 3912 - RNA, 21 nt, Artificial Sequence
  Description of Artificial Sequence:  siNA sense region
  misc_feature (20)..(21): n stands for thymidine
gaggagccgugguccgcgcnn

SEQ ID NO: 3913 - RNA, 21 nt, Artificial Sequence
  Description of Artificial Sequence:  siNA sense region
  misc_feature (20)..(21): n stands for thymidine
gggaggagccgcagccggann

SEQ ID NO: 3914 - RNA, 21 nt, Artificial Sequence
  Description of Artificial Sequence:  siNA sense region
  misc_feature (20)..(21): n stands for thymidine
ggaggagccgcagccggagnn

SEQ ID NO: 3915 - RNA, 21 nt, Artificial Sequence
  Description of Artificial Sequence:  siNA sense region
  misc_feature (20)..(21): n stands for thymidine
gaggagccgcagccggaggnn

SEQ ID NO: 3916 - RNA, 21 nt, Artificial Sequence
  Description of Artificial Sequence:  siNA sense region
  misc_feature (20)..(21): n stands for thymidine
agagaaggaagaggagaggnn

SEQ ID NO: 3917 - RNA, 21 nt, Artificial Sequence
  Description of Artificial Sequence:  siNA sense region
  misc_feature (20)..(21): n stands for thymidine
gcuccagccgcgcgcgcucnn

SEQ ID NO: 3918 - RNA, 21 nt, Artificial Sequence
  Description of Artificial Sequence:  siNA sense region
  misc_feature (20)..(21): n stands for thymidine
cccacagcccgagccggagnn

SEQ ID NO: 3919 - RNA, 21 nt, Artificial Sequence
  Description of Artificial Sequence:  siNA sense region
  misc_feature (20)..(21): n stands for thymidine
ccacagcccgagccggagann

SEQ ID NO: 3920 - RNA, 21 nt, Artificial Sequence
  Description of Artificial Sequence:  siNA sense region
  misc_feature (20)..(21): n stands for thymidine
caugaacuuucugcugucunn

SEQ ID NO: 3921 - RNA, 21 nt, Artificial Sequence
  Description of Artificial Sequence:  siNA sense region
  misc_feature (20)..(21): n stands for thymidine
acuuucugcugucuugggunn

SEQ ID NO: 3922 - RNA, 21 nt, Artificial Sequence
  Description of Artificial Sequence:  siNA sense region
  misc_feature (20)..(21): n stands for thymidine
ugcugucuugggugcauugnn

SEQ ID NO: 3923 - RNA, 21 nt, Artificial Sequence
  Description of Artificial Sequence:  siNA sense region
  misc_feature (20)..(21): n stands for thymidine
ugcauuggagccuugccuunn

SEQ ID NO: 3924 - RNA, 21 nt, Artificial Sequence
  Description of Artificial Sequence:  siNA sense region
  misc_feature (20)..(21): n stands for thymidine
cuugccuugcugcucuaccnn

SEQ ID NO: 3925 - RNA, 21 nt, Artificial Sequence
  Description of Artificial Sequence:  siNA sense region
  misc_feature (20)..(21): n stands for thymidine
accuccaccaugccaagugnn

SEQ ID NO: 3926 - RNA, 21 nt, Artificial Sequence
  Description of Artificial Sequence:  siNA sense region
  misc_feature (20)..(21): n stands for thymidine
ccuccaccaugccaaguggnn

SEQ ID NO: 3927 - RNA, 21 nt, Artificial Sequence
  Description of Artificial Sequence:  siNA sense region
  misc_feature (20)..(21): n stands for thymidine
ccaugccaaguggucccagnn

SEQ ID NO: 3928 - RNA, 21 nt, Artificial Sequence
  Description of Artificial Sequence:  siNA sense region
  misc_feature (20)..(21): n stands for thymidine
ccaggcugcacccauggcann

SEQ ID NO: 3929 - RNA, 21 nt, Artificial Sequence
  Description of Artificial Sequence:  siNA sense region
  misc_feature (20)..(21): n stands for thymidine
ucuaucagcgcagcuacugnn

SEQ ID NO: 3930 - RNA, 21 nt, Artificial Sequence
  Description of Artificial Sequence:  siNA sense region
  misc_feature (20)..(21): n stands for thymidine
ucuuccaggaguacccugann

SEQ ID NO: 3931 - RNA, 21 nt, Artificial Sequence
  Description of Artificial Sequence:  siNA sense region
  misc_feature (20)..(21): n stands for thymidine
ucuucaagccauccugugunn

SEQ ID NO: 3932 - RNA, 21 nt, Artificial Sequence
  Description of Artificial Sequence:  siNA sense region
  misc_feature (20)..(21): n stands for thymidine
aaugacgagggccuggagunn

SEQ ID NO: 3933 - RNA, 21 nt, Artificial Sequence
  Description of Artificial Sequence:  siNA sense region
  misc_feature (20)..(21): n stands for thymidine
ggccuggagugugugcccann

SEQ ID NO: 3934 - RNA, 21 nt, Artificial Sequence
  Description of Artificial Sequence:  siNA sense region
  misc_feature (20)..(21): n stands for thymidine
cacugaggaguccaacaucnn

SEQ ID NO: 3935 - RNA, 21 nt, Artificial Sequence
  Description of Artificial Sequence:  siNA sense region
  misc_feature (20)..(21): n stands for thymidine
caacaucaccaugcagauunn

SEQ ID NO: 3936 - RNA, 21 nt, Artificial Sequence
  Description of Artificial Sequence:  siNA sense region
  misc_feature (20)..(21): n stands for thymidine
aucaccaugcagauuaugcnn

SEQ ID NO: 3937 - RNA, 21 nt, Artificial Sequence
  Description of Artificial Sequence:  siNA sense region
  misc_feature (20)..(21): n stands for thymidine
cagauuaugcggaucaaacnn

SEQ ID NO: 3938 - RNA, 21 nt, Artificial Sequence
  Description of Artificial Sequence:  siNA sense region
  misc_feature (20)..(21): n stands for thymidine
agauuaugcggaucaaaccnn

SEQ ID NO: 3939 - RNA, 21 nt, Artificial Sequence
  Description of Artificial Sequence:  siNA sense region
  misc_feature (20)..(21): n stands for thymidine
gauuaugcggaucaaaccunn

SEQ ID NO: 3940 - RNA, 21 nt, Artificial Sequence
  Description of Artificial Sequence:  siNA sense region
  misc_feature (20)..(21): n stands for thymidine
aggagagaugagcuuccuann

SEQ ID NO: 3941 - RNA, 21 nt, Artificial Sequence
  Description of Artificial Sequence:  siNA sense region
  misc_feature (20)..(21): n stands for thymidine
gagcuuccuacagcacaacnn

SEQ ID NO: 3942 - RNA, 21 nt, Artificial Sequence
  Description of Artificial Sequence:  siNA sense region
  misc_feature (20)..(21): n stands for thymidine
cuuccuacagcacaacaaann

SEQ ID NO: 3943 - RNA, 21 nt, Artificial Sequence
  Description of Artificial Sequence:  siNA sense region
  misc_feature (20)..(21): n stands for thymidine
acagcacaacaaaugugaann

SEQ ID NO: 3944 - RNA, 21 nt, Artificial Sequence
  Description of Artificial Sequence:  siNA sense region
  misc_feature (20)..(21): n stands for thymidine
cagcacaacaaaugugaaunn

SEQ ID NO: 3945 - RNA, 21 nt, Artificial Sequence
  Description of Artificial Sequence:  siNA sense region
  misc_feature (20)..(21): n stands for thymidine
aaaugugaaugcagaccaann

SEQ ID NO: 3946 - RNA, 21 nt, Artificial Sequence
  Description of Artificial Sequence:  siNA antisense region
  misc_feature (20)..(21): n stands for thymidine
uuuaagaaaaaagaagaggnn

SEQ ID NO: 3947 - RNA, 21 nt, Artificial Sequence
  Description of Artificial Sequence:  siNA antisense region
  misc_feature (20)..(21): n stands for thymidine
guuuaagaaaaaagaagagnn

SEQ ID NO: 3948 - RNA, 21 nt, Artificial Sequence
  Description of Artificial Sequence:  siNA antisense region
  misc_feature (20)..(21): n stands for thymidine
uguuuaagaaaaaagaagann

SEQ ID NO: 3949 - RNA, 21 nt, Artificial Sequence
  Description of Artificial Sequence:  siNA antisense region
  misc_feature (20)..(21): n stands for thymidine
aauguuuaagaaaaaagaann

SEQ ID NO: 3950 - RNA, 21 nt, Artificial Sequence
  Description of Artificial Sequence:  siNA antisense region
  misc_feature (20)..(21): n stands for thymidine
aaaaauguuuaagaaaaaann

SEQ ID NO: 3951 - RNA, 21 nt, Artificial Sequence
  Description of Artificial Sequence:  siNA antisense region
  misc_feature (20)..(21): n stands for thymidine
aaaaaaauguuuaagaaaann

SEQ ID NO: 3952 - RNA, 21 nt, Artificial Sequence
  Description of Artificial Sequence:  siNA antisense region
  misc_feature (20)..(21): n stands for thymidine
aaaaaaaauguuuaagaaann

SEQ ID NO: 3953 - RNA, 21 nt, Artificial Sequence
  Description of Artificial Sequence:  siNA antisense region
  misc_feature (20)..(21): n stands for thymidine
acaguuuuaaaaaaaaaugnn

SEQ ID NO: 3954 - RNA, 21 nt, Artificial Sequence
  Description of Artificial Sequence:  siNA antisense region
  misc_feature (20)..(21): n stands for thymidine
aacaauacaguuuuaaaaann

SEQ ID NO: 3955 - RNA, 21 nt, Artificial Sequence
  Description of Artificial Sequence:  siNA antisense region
  misc_feature (20)..(21): n stands for thymidine
aaacaauacaguuuuaaaann

SEQ ID NO: 3956 - RNA, 21 nt, Artificial Sequence
  Description of Artificial Sequence:  siNA antisense region
  misc_feature (20)..(21): n stands for thymidine
cgagaaacaauacaguuuunn

SEQ ID NO: 3957 - RNA, 21 nt, Artificial Sequence
  Description of Artificial Sequence:  siNA antisense region
  misc_feature (20)..(21): n stands for thymidine
uaaauuaaaacgagaaacann

SEQ ID NO: 3958 - RNA, 21 nt, Artificial Sequence
  Description of Artificial Sequence:  siNA antisense region
  misc_feature (20)..(21): n stands for thymidine
gggaauggcaagcaaaaaunn

SEQ ID NO: 3959 - RNA, 21 nt, Artificial Sequence
  Description of Artificial Sequence:  siNA antisense region
  misc_feature (20)..(21): n stands for thymidine
ucggcccgauucaagugggnn

SEQ ID NO: 3960 - RNA, 21 nt, Artificial Sequence
  Description of Artificial Sequence:  siNA antisense region
  misc_feature (20)..(21): n stands for thymidine
gucggcccgauucaaguggnn

SEQ ID NO: 3961 - RNA, 21 nt, Artificial Sequence
  Description of Artificial Sequence:  siNA antisense region
  misc_feature (20)..(21): n stands for thymidine
uuccucgacuucucucuggnn

SEQ ID NO: 3962 - RNA, 21 nt, Artificial Sequence
  Description of Artificial Sequence:  siNA antisense region
  misc_feature (20)..(21): n stands for thymidine
cuuccucgacuucucucugnn

SEQ ID NO: 3963 - RNA, 21 nt, Artificial Sequence
  Description of Artificial Sequence:  siNA antisense region
  misc_feature (20)..(21): n stands for thymidine
cgcccgcgcgcucucucugnn

SEQ ID NO: 3964 - RNA, 21 nt, Artificial Sequence
  Description of Artificial Sequence:  siNA antisense region
  misc_feature (20)..(21): n stands for thymidine
ucagcgcgacuggucagcunn

SEQ ID NO: 3965 - RNA, 21 nt, Artificial Sequence
  Description of Artificial Sequence:  siNA antisense region
  misc_feature (20)..(21): n stands for thymidine
cuccgggcgcgggcuccggnn

SEQ ID NO: 3966 - RNA, 21 nt, Artificial Sequence
  Description of Artificial Sequence:  siNA antisense region
  misc_feature (20)..(21): n stands for thymidine
ccuccgggcgcgggcuccgnn

SEQ ID NO: 3967 - RNA, 21 nt, Artificial Sequence
  Description of Artificial Sequence:  siNA antisense region
  misc_feature (20)..(21): n stands for thymidine
gccuccgggcgcgggcuccnn

SEQ ID NO: 3968 - RNA, 21 nt, Artificial Sequence
  Description of Artificial Sequence:  siNA antisense region
  misc_feature (20)..(21): n stands for thymidine
guuggacgaaaaguuucagnn

SEQ ID NO: 3969 - RNA, 21 nt, Artificial Sequence
  Description of Artificial Sequence:  siNA antisense region
  misc_feature (20)..(21): n stands for thymidine
aguuggacgaaaaguuucann

SEQ ID NO: 3970 - RNA, 21 nt, Artificial Sequence
  Description of Artificial Sequence:  siNA antisense region
  misc_feature (20)..(21): n stands for thymidine
aaguuggacgaaaaguuucnn

SEQ ID NO: 3971 - RNA, 21 nt, Artificial Sequence
  Description of Artificial Sequence:  siNA antisense region
  misc_feature (20)..(21): n stands for thymidine
ccagaaguuggacgaaaagnn

SEQ ID NO: 3972 - RNA, 21 nt, Artificial Sequence
  Description of Artificial Sequence:  siNA antisense region
  misc_feature (20)..(21): n stands for thymidine
gaagcgagaacagcccagann

SEQ ID NO: 3973 - RNA, 21 nt, Artificial Sequence
  Description of Artificial Sequence:  siNA antisense region
  misc_feature (20)..(21): n stands for thymidine
ccgaagcgagaacagcccann

SEQ ID NO: 3974 - RNA, 21 nt, Artificial Sequence
  Description of Artificial Sequence:  siNA antisense region
  misc_feature (20)..(21): n stands for thymidine
cgcggaccacggcuccuccnn

SEQ ID NO: 3975 - RNA, 21 nt, Artificial Sequence
  Description of Artificial Sequence:  siNA antisense region
  misc_feature (20)..(21): n stands for thymidine
gcgcggaccacggcuccucnn

SEQ ID NO: 3976 - RNA, 21 nt, Artificial Sequence
  Description of Artificial Sequence:  siNA antisense region
  misc_feature (20)..(21): n stands for thymidine
uccggcugcggcuccucccnn

SEQ ID NO: 3977 - RNA, 21 nt, Artificial Sequence
  Description of Artificial Sequence:  siNA antisense region
  misc_feature (20)..(21): n stands for thymidine
cuccggcugcggcuccuccnn

SEQ ID NO: 3978 - RNA, 21 nt, Artificial Sequence
  Description of Artificial Sequence:  siNA antisense region
  misc_feature (20)..(21): n stands for thymidine
ccuccggcugcggcuccucnn

SEQ ID NO: 3979 - RNA, 21 nt, Artificial Sequence
  Description of Artificial Sequence:  siNA antisense region
  misc_feature (20)..(21): n stands for thymidine
ccucuccucuuccuucucunn

SEQ ID NO: 3980 - RNA, 21 nt, Artificial Sequence
  Description of Artificial Sequence:  siNA antisense region
  misc_feature (20)..(21): n stands for thymidine
gagcgcgcgcggcuggagcnn

SEQ ID NO: 3981 - RNA, 21 nt, Artificial Sequence
  Description of Artificial Sequence:  siNA antisense region
  misc_feature (20)..(21): n stands for thymidine
cuccggcucgggcugugggnn

SEQ ID NO: 3982 - RNA, 21 nt, Artificial Sequence
  Description of Artificial Sequence:  siNA antisense region
  misc_feature (20)..(21): n stands for thymidine
ucuccggcucgggcuguggnn

SEQ ID NO: 3983 - RNA, 21 nt, Artificial Sequence
  Description of Artificial Sequence:  siNA antisense region
  misc_feature (20)..(21): n stands for thymidine
agacagcagaaaguucaugnn

SEQ ID NO: 3984 - RNA, 21 nt, Artificial Sequence
  Description of Artificial Sequence:  siNA antisense region
  misc_feature (20)..(21): n stands for thymidine
acccaagacagcagaaagunn

SEQ ID NO: 3985 - RNA, 21 nt, Artificial Sequence
  Description of Artificial Sequence:  siNA antisense region
  misc_feature (20)..(21): n stands for thymidine
caaugcacccaagacagcann

SEQ ID NO: 3986 - RNA, 21 nt, Artificial Sequence
  Description of Artificial Sequence:  siNA antisense region
  misc_feature (20)..(21): n stands for thymidine
aaggcaaggcuccaaugcann

SEQ ID NO: 3987 - RNA, 21 nt, Artificial Sequence
  Description of Artificial Sequence:  siNA antisense region
  misc_feature (20)..(21): n stands for thymidine
gguagagcagcaaggcaagnn

SEQ ID NO: 3988 - RNA, 21 nt, Artificial Sequence
  Description of Artificial Sequence:  siNA antisense region
  misc_feature (20)..(21): n stands for thymidine
cacuuggcaugguggaggunn

SEQ ID NO: 3989 - RNA, 21 nt, Artificial Sequence
  Description of Artificial Sequence:  siNA antisense region
  misc_feature (20)..(21): n stands for thymidine
ccacuuggcaugguggaggnn

SEQ ID NO: 3990 - RNA, 21 nt, Artificial Sequence
  Description of Artificial Sequence:  siNA antisense region
  misc_feature (20)..(21): n stands for thymidine
cugggaccacuuggcauggnn

SEQ ID NO: 3991 - RNA, 21 nt, Artificial Sequence
  Description of Artificial Sequence:  siNA antisense region
  misc_feature (20)..(21): n stands for thymidine
ugccaugggugcagccuggnn

SEQ ID NO: 3992 - RNA, 21 nt, Artificial Sequence
  Description of Artificial Sequence:  siNA antisense region
  misc_feature (20)..(21): n stands for thymidine
caguagcugcgcugauagann

SEQ ID NO: 3993 - RNA, 21 nt, Artificial Sequence
  Description of Artificial Sequence:  siNA antisense region
  misc_feature (20)..(21): n stands for thymidine
ucaggguacuccuggaagann

SEQ ID NO: 3994 - RNA, 21 nt, Artificial Sequence
  Description of Artificial Sequence:  siNA antisense region
  misc_feature (20)..(21): n stands for thymidine
acacaggauggcuugaagann

SEQ ID NO: 3995 - RNA, 21 nt, Artificial Sequence
  Description of Artificial Sequence:  siNA antisense region
  misc_feature (20)..(21): n stands for thymidine
acuccaggcccucgucauunn

SEQ ID NO: 3996 - RNA, 21 nt, Artificial Sequence
  Description of Artificial Sequence:  siNA antisense region
  misc_feature (20)..(21): n stands for thymidine
ugggcacacacuccaggccnn

SEQ ID NO: 3997 - RNA, 21 nt, Artificial Sequence
  Description of Artificial Sequence:  siNA antisense region
  misc_feature (20)..(21): n stands for thymidine
gauguuggacuccucagugnn

SEQ ID NO: 3998 - RNA, 21 nt, Artificial Sequence
  Description of Artificial Sequence:  siNA antisense region
  misc_feature (20)..(21): n stands for thymidine
aaucugcauggugauguugnn

SEQ ID NO: 3999 - RNA, 21 nt, Artificial Sequence
  Description of Artificial Sequence:  siNA antisense region
  misc_feature (20)..(21): n stands for thymidine
gcauaaucugcauggugaunn

SEQ ID NO: 4000 - RNA, 21 nt, Artificial Sequence
  Description of Artificial Sequence:  siNA antisense region
  misc_feature (20)..(21): n stands for thymidine
guuugauccgcauaaucugnn

SEQ ID NO: 4001 - RNA, 21 nt, Artificial Sequence
  Description of Artificial Sequence:  siNA antisense region
  misc_feature (20)..(21): n stands for thymidine
gguuugauccgcauaaucunn

SEQ ID NO: 4002 - RNA, 21 nt, Artificial Sequence
  Description of Artificial Sequence:  siNA antisense region
  misc_feature (20)..(21): n stands for thymidine
agguuugauccgcauaaucnn

SEQ ID NO: 4003 - RNA, 21 nt, Artificial Sequence
  Description of Artificial Sequence:  siNA antisense region
  misc_feature (20)..(21): n stands for thymidine
uaggaagcucaucucuccunn

SEQ ID NO: 4004 - RNA, 21 nt, Artificial Sequence
  Description of Artificial Sequence:  siNA antisense region
  misc_feature (20)..(21): n stands for thymidine
guugugcuguaggaagcucnn

SEQ ID NO: 4005 - RNA, 21 nt, Artificial Sequence
  Description of Artificial Sequence:  siNA antisense region
  misc_feature (20)..(21): n stands for thymidine
uuuguugugcuguaggaagnn

SEQ ID NO: 4006 - RNA, 21 nt, Artificial Sequence
  Description of Artificial Sequence:  siNA antisense region
  misc_feature (20)..(21): n stands for thymidine
uucacauuuguugugcugunn

SEQ ID NO: 4007 - RNA, 21 nt, Artificial Sequence
  Description of Artificial Sequence:  siNA antisense region
  misc_feature (20)..(21): n stands for thymidine
auucacauuuguugugcugnn

SEQ ID NO: 4008 - RNA, 21 nt, Artificial Sequence
  Description of Artificial Sequence:  siNA antisense region
  misc_feature (20)..(21): n stands for thymidine
uuggucugcauucacauuunn

SEQ ID NO: 4009 - RNA, 21 nt, Artificial Sequence
  Description of Artificial Sequence:  siNA sense region
  misc_feature (1)..(1): 5'-3 attached terminal deoxyabasic moeity
  misc_feature (1)..(5): 2'-deoxy-2'-fluoro
  misc_feature (6)..(6): 2'-deoxy
  misc_feature (7)..(8): 2'-deoxy-2'-fluoro
  misc_feature (9)..(9): 2'-deoxy
  misc_feature (10)..(10): 2'-deoxy-2'-fluoro
  misc_feature (11)..(11): 2'-deoxy
  misc_feature (12)..(13): 2'-deoxy-2'-fluoro
  misc_feature (14)..(16): 2'-deoxy
  misc_feature (17)..(17): 2'-deoxy-2'-fluoro
  misc_feature (18)..(19): 2'-deoxy
  misc_feature (20)..(20): n stands for thymidine
  misc_feature (21)..(21): 3'-3 attached terminal deoxyabasic moeity
ccuccaccaugccaaguggnn

SEQ ID NO: 4010 - RNA, 21 nt, Artificial Sequence
  Description of Artificial Sequence:  siNA sense region
  misc_feature (1)..(4): 2'-deoxy-2'-fluoro
  misc_feature (1)..(1): 5'-3 attached terminal deoxyabasic moeity
  misc_feature (5)..(5): 2'-deoxy
  misc_feature (6)..(7): 2'-deoxy-2'-fluoro
  misc_feature (8)..(8): 2'-deoxy
  misc_feature (9)..(9): 2'-deoxy-2'-fluoro
  misc_feature (10)..(10): 2'-deoxy
  misc_feature (11)..(12): 2'-deoxy-2'-fluoro
  misc_feature (13)..(15): 2'-deoxy
  misc_feature (16)..(16): 2'-deoxy-2'-fluoro
  misc_feature (17)..(18): 2'-deoxy
  misc_feature (19)..(19): 2'-deoxy-2'-fluoro
  misc_feature (20)..(20): n stands for thymidine
  misc_feature (21)..(21): 3'-3 attached terminal deoxyabasic moeity
cuccaccaugccaaguggunn

SEQ ID NO: 4011 - RNA, 21 nt, Artificial Sequence
  Description of Artificial Sequence:  siNA sense region
  misc_feature (1)..(1): 5'-3 attached terminal deoxyabasic moeity
  misc_feature (1)..(2): 2'-deoxy-2'-fluoro
  misc_feature (3)..(3): 2'-deoxy
  misc_feature (4)..(4): 2'-deoxy-2'-fluoro
  misc_feature (5)..(5): 2'-deoxy
  misc_feature (6)..(7): 2'-deoxy-2'-fluoro
  misc_feature (8)..(10): 2'-deoxy
  misc_feature (11)..(11): 2'-deoxy-2'-fluoro
  misc_feature (12)..(13): 2'-deoxy
  misc_feature (14)..(17): 2'-deoxy-2'-fluoro
  misc_feature (18)..(19): 2'-deoxy
  misc_feature (20)..(20): n stands for thymidine
  misc_feature (21)..(21): 3'-3 attached terminal deoxyabasic moeity
ccaugccaaguggucccagnn

SEQ ID NO: 4012 - RNA, 21 nt, Artificial Sequence
  Description of Artificial Sequence:  siNA sense region
  misc_feature (1)..(1): 2'-deoxy-2'-fluoro
  misc_feature (1)..(1): 5'-3 attached terminal deoxyabasic moeity
  misc_feature (2)..(2): 2'-deoxy
  misc_feature (3)..(3): 2'-deoxy-2'-fluoro
  misc_feature (4)..(4): 2'-deoxy
  misc_feature (5)..(6): 2'-deoxy-2'-fluoro
  misc_feature (7)..(9): 2'-deoxy
  misc_feature (10)..(10): 2'-deoxy-2'-fluoro
  misc_feature (11)..(12): 2'-deoxy
  misc_feature (13)..(16): 2'-deoxy-2'-fluoro
  misc_feature (17)..(19): 2'-deoxy
  misc_feature (20)..(20): n stands for thymidine
  misc_feature (21)..(21): 3'-3 attached terminal deoxyabasic moeity
caugccaaguggucccaggnn

SEQ ID NO: 4013 - RNA, 21 nt, Artificial Sequence
  Description of Artificial Sequence:  siNA sense region
  misc_feature (1)..(1): 5'-3 attached terminal deoxyabasic moeity
  misc_feature (1)..(1): 2'-deoxy
  misc_feature (2)..(2): 2'-deoxy-2'-fluoro
  misc_feature (3)..(3): 2'-deoxy
  misc_feature (4)..(5): 2'-deoxy-2'-fluoro
  misc_feature (6)..(8): 2'-deoxy
  misc_feature (9)..(9): 2'-deoxy-2'-fluoro
  misc_feature (10)..(11): 2'-deoxy
  misc_feature (12)..(15): 2'-deoxy-2'-fluoro
  misc_feature (16)..(18): 2'-deoxy
  misc_feature (19)..(19): 2'-deoxy-2'-fluoro
  misc_feature (20)..(20): n stands for thymidine
  misc_feature (21)..(21): 3'-3 attached terminal deoxyabasic moeity
augccaaguggucccaggcnn

SEQ ID NO: 4014 - RNA, 21 nt, Artificial Sequence
  Description of Artificial Sequence:  siNA sense region
  misc_feature (1)..(1): 2'-deoxy-2'-fluoro
  misc_feature (1)..(1): 5'-3 attached terminal deoxyabasic moeity
  misc_feature (2)..(2): 2'-deoxy
  misc_feature (3)..(4): 2'-deoxy-2'-fluoro
  misc_feature (5)..(7): 2'-deoxy
  misc_feature (8)..(8): 2'-deoxy-2'-fluoro
  misc_feature (9)..(10): 2'-deoxy
  misc_feature (11)..(14): 2'-deoxy-2'-fluoro
  misc_feature (15)..(17): 2'-deoxy
  misc_feature (18)..(19): 2'-deoxy-2'-fluoro
  misc_feature (20)..(20): n stands for thymidine
  misc_feature (21)..(21): 3'-3 attached terminal deoxyabasic moeity
ugccaaguggucccaggcunn

SEQ ID NO: 4015 - RNA, 21 nt, Artificial Sequence
  Description of Artificial Sequence:  siNA sense region
  misc_feature (1)..(1): 5'-3 attached terminal deoxyabasic moeity
  misc_feature (1)..(1): 2'-deoxy
  misc_feature (2)..(3): 2'-deoxy-2'-fluoro
  misc_feature (4)..(6): 2'-deoxy
  misc_feature (7)..(7): 2'-deoxy-2'-fluoro
  misc_feature (8)..(9): 2'-deoxy
  misc_feature (10)..(13): 2'-deoxy-2'-fluoro
  misc_feature (14)..(16): 2'-deoxy
  misc_feature (17)..(18): 2'-deoxy-2'-fluoro
  misc_feature (19)..(19): 2'-deoxy
  misc_feature (20)..(20): n stands for thymidine
  misc_feature (21)..(21): 3'-3 attached terminal deoxyabasic moeity
gccaaguggucccaggcugnn

SEQ ID NO: 4016 - RNA, 21 nt, Artificial Sequence
  Description of Artificial Sequence:  siNA sense region
  misc_feature (1)..(2): 2'-deoxy-2'-fluoro
  misc_feature (1)..(1): 5'-3 attached terminal deoxyabasic moeity
  misc_feature (3)..(5): 2'-deoxy
  misc_feature (6)..(6): 2'-deoxy-2'-fluoro
  misc_feature (7)..(8): 2'-deoxy
  misc_feature (9)..(12): 2'-deoxy-2'-fluoro
  misc_feature (13)..(15): 2'-deoxy
  misc_feature (16)..(17): 2'-deoxy-2'-fluoro
  misc_feature (18)..(18): 2'-deoxy
  misc_feature (19)..(19): 2'-deoxy-2'-fluoro
  misc_feature (20)..(20): n stands for thymidine
  misc_feature (21)..(21): 3'-3 attached terminal deoxyabasic moeity
ccaaguggucccaggcugcnn

SEQ ID NO: 4017 - RNA, 21 nt, Artificial Sequence
  Description of Artificial Sequence:  siNA sense region
  misc_feature (1)..(1): 5'-3 attached terminal deoxyabasic moeity
  misc_feature (1)..(1): 2'-deoxy
  misc_feature (2)..(2): 2'-deoxy-2'-fluoro
  misc_feature (3)..(4): 2'-deoxy
  misc_feature (5)..(8): 2'-deoxy-2'-fluoro
  misc_feature (9)..(11): 2'-deoxy
  misc_feature (12)..(13): 2'-deoxy-2'-fluoro
  misc_feature (14)..(14): 2'-deoxy
  misc_feature (15)..(15): 2'-deoxy-2'-fluoro
  misc_feature (16)..(16): 2'-deoxy
  misc_feature (17)..(19): 2'-deoxy-2'-fluoro
  misc_feature (20)..(20): n stands for thymidine
  misc_feature (21)..(21): 3'-3 attached terminal deoxyabasic moeity
guggucccaggcugcacccnn

SEQ ID NO: 4018 - RNA, 21 nt, Artificial Sequence
  Description of Artificial Sequence:  siNA sense region
  misc_feature (1)..(1): 2'-deoxy-2'-fluoro
  misc_feature (1)..(1): 5'-3 attached terminal deoxyabasic moeity
  misc_feature (2)..(3): 2'-deoxy
  misc_feature (4)..(7): 2'-deoxy-2'-fluoro
  misc_feature (8)..(10): 2'-deoxy
  misc_feature (11)..(12): 2'-deoxy-2'-fluoro
  misc_feature (13)..(13): 2'-deoxy
  misc_feature (14)..(14): 2'-deoxy-2'-fluoro
  misc_feature (15)..(15): 2'-deoxy
  misc_feature (16)..(18): 2'-deoxy-2'-fluoro
  misc_feature (19)..(19): 2'-deoxy
  misc_feature (20)..(20): n stands for thymidine
  misc_feature (21)..(21): 3'-3 attached terminal deoxyabasic moeity
uggucccaggcugcacccann

SEQ ID NO: 4019 - RNA, 21 nt, Artificial Sequence
  Description of Artificial Sequence:  siNA sense region
  misc_feature (1)..(1): 5'-3 attached terminal deoxyabasic moeity
  misc_feature (1)..(4): 2'-deoxy-2'-fluoro
  misc_feature (5)..(6): 2'-deoxy
  misc_feature (7)..(7): 2'-deoxy-2'-fluoro
  misc_feature (8)..(10): 2'-deoxy
  misc_feature (11)..(11): 2'-deoxy-2'-fluoro
  misc_feature (12)..(12): 2'-deoxy
  misc_feature (13)..(18): 2'-deoxy-2'-fluoro
  misc_feature (19)..(19): 2'-deoxy
  misc_feature (20)..(20): n stands for thymidine
  misc_feature (21)..(21): 3'-3 attached terminal deoxyabasic moeity
cccugguggacaucuuccann

SEQ ID NO: 4020 - RNA, 21 nt, Artificial Sequence
  Description of Artificial Sequence:  siNA sense region
  misc_feature (1)..(2): 2'-deoxy
  misc_feature (1)..(1): 5'-3 attached terminal deoxyabasic moeity
  misc_feature (3)..(3): 2'-deoxy-2'-fluoro
  misc_feature (4)..(4): 2'-deoxy
  misc_feature (5)..(5): 2'-deoxy-2'-fluoro
  misc_feature (6)..(8): 2'-deoxy
  misc_feature (9)..(10): 2'-deoxy-2'-fluoro
  misc_feature (11)..(19): 2'-deoxy
  misc_feature (20)..(20): n stands for thymidine
  misc_feature (21)..(21): 3'-3 attached terminal deoxyabasic moeity
aaugcagaccaaagaaagann

SEQ ID NO: 4021 - RNA, 21 nt, Artificial Sequence
  Description of Artificial Sequence:  siNA sense region
  misc_feature (1)..(1): 5'-3 attached terminal deoxyabasic moeity
  misc_feature (1)..(2): 2'-deoxy-2'-fluoro
  misc_feature (3)..(6): 2'-deoxy
  misc_feature (7)..(7): 2'-deoxy-2'-fluoro
  misc_feature (8)..(15): 2'-deoxy
  misc_feature (16)..(16): 2'-deoxy-2'-fluoro
  misc_feature (17)..(17): 2'-deoxy
  misc_feature (18)..(19): 2'-deoxy-2'-fluoro
  misc_feature (20)..(20): n stands for thymidine
  misc_feature (21)..(21): 3'-3 attached terminal deoxyabasic moeity
ucagagcggagaaagcauunn

SEQ ID NO: 4022 - RNA, 21 nt, Artificial Sequence
  Description of Artificial Sequence:  siNA sense region
  misc_feature (1)..(1): 2'-deoxy
  misc_feature (1)..(1): 5'-3 attached terminal deoxyabasic moeity
  misc_feature (2)..(2): 2'-deoxy-2'-fluoro
  misc_feature (3)..(5): 2'-deoxy
  misc_feature (6)..(6): 2'-deoxy-2'-fluoro
  misc_feature (7)..(7): 2'-deoxy
  misc_feature (8)..(8): 2'-deoxy-2'-fluoro
  misc_feature (9)..(9): 2'-deoxy
  misc_feature (10)..(10): 2'-deoxy-2'-fluoro
  misc_feature (11)..(13): 2'-deoxy
  misc_feature (14)..(14): 2'-deoxy-2'-fluoro
  misc_feature (15)..(15): 2'-deoxy
  misc_feature (16)..(19): 2'-deoxy-2'-fluoro
  misc_feature (20)..(20): n stands for thymidine
  misc_feature (21)..(21): 3'-3 attached terminal deoxyabasic moeity
gcagacguguaaauguuccnn

SEQ ID NO: 4023 - RNA, 21 nt, Artificial Sequence
  Description of Artificial Sequence:  siNA sense region
  misc_feature (1)..(1): 5'-3 attached terminal deoxyabasic moeity
  misc_feature (1)..(1): 2'-deoxy-2'-fluoro
  misc_feature (2)..(4): 2'-deoxy
  misc_feature (5)..(5): 2'-deoxy-2'-fluoro
  misc_feature (6)..(6): 2'-deoxy
  misc_feature (7)..(7): 2'-deoxy-2'-fluoro
  misc_feature (8)..(8): 2'-deoxy
  misc_feature (9)..(9): 2'-deoxy-2'-fluoro
  misc_feature (10)..(12): 2'-deoxy
  misc_feature (13)..(13): 2'-deoxy-2'-fluoro
  misc_feature (14)..(14): 2'-deoxy
  misc_feature (15)..(19): 2'-deoxy-2'-fluoro
  misc_feature (20)..(20): n stands for thymidine
  misc_feature (21)..(21): 3'-3 attached terminal deoxyabasic moeity
cagacguguaaauguuccunn

SEQ ID NO: 4024 - RNA, 21 nt, Artificial Sequence
  Description of Artificial Sequence:  siNA sense region
  misc_feature (1)..(1): 2'-deoxy-2'-fluoro
  misc_feature (1)..(1): 5'-3 attached terminal deoxyabasic moeity
  misc_feature (2)..(2): 2'-deoxy
  misc_feature (3)..(3): 2'-deoxy-2'-fluoro
  misc_feature (4)..(4): 2'-deoxy
  misc_feature (5)..(5): 2'-deoxy-2'-fluoro
  misc_feature (6)..(8): 2'-deoxy
  misc_feature (9)..(9): 2'-deoxy-2'-fluoro
  misc_feature (10)..(10): 2'-deoxy
  misc_feature (11)..(15): 2'-deoxy-2'-fluoro
  misc_feature (16)..(16): 2'-deoxy
  misc_feature (17)..(17): 2'-deoxy-2'-fluoro
  misc_feature (18)..(19): 2'-deoxy
  misc_feature (20)..(20): n stands for thymidine
  misc_feature (21)..(21): 3'-3 attached terminal deoxyabasic moeity
cguguaaauguuccugcaann

SEQ ID NO: 4025 - RNA, 21 nt, Artificial Sequence
  Description of Artificial Sequence:  siNA sense region
  misc_feature (1)..(1): 5'-3 attached terminal deoxyabasic moeity
  misc_feature (1)..(1): 2'-deoxy-2'-fluoro
  misc_feature (2)..(2): 2'-deoxy
  misc_feature (3)..(3): 2'-deoxy-2'-fluoro
  misc_feature (4)..(6): 2'-deoxy
  misc_feature (7)..(7): 2'-deoxy-2'-fluoro
  misc_feature (8)..(8): 2'-deoxy
  misc_feature (9)..(13): 2'-deoxy-2'-fluoro
  misc_feature (14)..(14): 2'-deoxy
  misc_feature (15)..(15): 2'-deoxy-2'-fluoro
  misc_feature (16)..(19): 2'-deoxy
  misc_feature (20)..(20): n stands for thymidine
  misc_feature (21)..(21): 3'-3 attached terminal deoxyabasic moeity
uguaaauguuccugcaaaann

SEQ ID NO: 4026 - RNA, 21 nt, Artificial Sequence
  Description of Artificial Sequence:  siNA sense region
  misc_feature (1)..(1): 2'-deoxy
  misc_feature (1)..(1): 5'-3 attached terminal deoxyabasic moeity
  misc_feature (2)..(2): 2'-deoxy-2'-fluoro
  misc_feature (3)..(5): 2'-deoxy
  misc_feature (6)..(6): 2'-deoxy-2'-fluoro
  misc_feature (7)..(7): 2'-deoxy
  misc_feature (8)..(12): 2'-deoxy-2'-fluoro
  misc_feature (13)..(13): 2'-deoxy
  misc_feature (14)..(14): 2'-deoxy-2'-fluoro
  misc_feature (15)..(19): 2'-deoxy
  misc_feature (20)..(20): n stands for thymidine
  misc_feature (21)..(21): 3'-3 attached terminal deoxyabasic moeity
guaaauguuccugcaaaaann

SEQ ID NO: 4027 - RNA, 21 nt, Artificial Sequence
  Description of Artificial Sequence:  siNA sense region
  misc_feature (1)..(1): 5'-3 attached terminal deoxyabasic moeity
  misc_feature (1)..(1): 2'-deoxy-2'-fluoro
  misc_feature (2)..(4): 2'-deoxy
  misc_feature (5)..(5): 2'-deoxy-2'-fluoro
  misc_feature (6)..(6): 2'-deoxy
  misc_feature (7)..(11): 2'-deoxy-2'-fluoro
  misc_feature (12)..(12): 2'-deoxy
  misc_feature (13)..(13): 2'-deoxy-2'-fluoro
  misc_feature (14)..(18): 2'-deoxy
  misc_feature (19)..(19): 2'-deoxy-2'-fluoro
  misc_feature (20)..(20): n stands for thymidine
  misc_feature (21)..(21): 3'-3 attached terminal deoxyabasic moeity
uaaauguuccugcaaaaacnn

SEQ ID NO: 4028 - RNA, 21 nt, Artificial Sequence
  Description of Artificial Sequence:  siNA sense region
  misc_feature (1)..(3): 2'-deoxy
  misc_feature (1)..(1): 5'-3 attached terminal deoxyabasic moeity
  misc_feature (4)..(4): 2'-deoxy-2'-fluoro
  misc_feature (5)..(5): 2'-deoxy
  misc_feature (6)..(10): 2'-deoxy-2'-fluoro
  misc_feature (11)..(11): 2'-deoxy
  misc_feature (12)..(12): 2'-deoxy-2'-fluoro
  misc_feature (13)..(17): 2'-deoxy
  misc_feature (18)..(18): 2'-deoxy-2'-fluoro
  misc_feature (19)..(19): 2'-deoxy
  misc_feature (20)..(20): n stands for thymidine
  misc_feature (21)..(21): 3'-3 attached terminal deoxyabasic moeity
aaauguuccugcaaaaacann

SEQ ID NO: 4029 - RNA, 21 nt, Artificial Sequence
  Description of Artificial Sequence:  siNA sense region
  misc_feature (1)..(1): 5'-3 attached terminal deoxyabasic moeity
  misc_feature (1)..(2): 2'-deoxy
  misc_feature (3)..(3): 2'-deoxy-2'-fluoro
  misc_feature (4)..(4): 2'-deoxy
  misc_feature (5)..(9): 2'-deoxy-2'-fluoro
  misc_feature (10)..(10): 2'-deoxy
  misc_feature (11)..(11): 2'-deoxy-2'-fluoro
  misc_feature (12)..(16): 2'-deoxy
  misc_feature (17)..(17): 2'-deoxy-2'-fluoro
  misc_feature (18)..(18): 2'-deoxy
  misc_feature (19)..(19): 2'-deoxy-2'-fluoro
  misc_feature (20)..(20): n stands for thymidine
  misc_feature (21)..(21): 3'-3 attached terminal deoxyabasic moeity
aauguuccugcaaaaacacnn

SEQ ID NO: 4030 - RNA, 21 nt, Artificial Sequence
  Description of Artificial Sequence:  siNA sense region
  misc_feature (1)..(1): 2'-deoxy-2'-fluoro
  misc_feature (1)..(1): 5'-3 attached terminal deoxyabasic moeity
  misc_feature (2)..(2): 2'-deoxy
  misc_feature (3)..(7): 2'-deoxy-2'-fluoro
  misc_feature (8)..(8): 2'-deoxy
  misc_feature (9)..(9): 2'-deoxy-2'-fluoro
  misc_feature (10)..(14): 2'-deoxy
  misc_feature (15)..(15): 2'-deoxy-2'-fluoro
  misc_feature (16)..(16): 2'-deoxy
  misc_feature (17)..(17): 2'-deoxy-2'-fluoro
  misc_feature (18)..(19): 2'-deoxy
  misc_feature (20)..(20): n stands for thymidine
  misc_feature (21)..(21): 3'-3 attached terminal deoxyabasic moeity
uguuccugcaaaaacacagnn

SEQ ID NO: 4031 - RNA, 21 nt, Artificial Sequence
  Description of Artificial Sequence:  siNA sense region
  misc_feature (1)..(1): 5'-3 attached terminal deoxyabasic moeity
  misc_feature (1)..(1): 2'-deoxy
  misc_feature (2)..(6): 2'-deoxy-2'-fluoro
  misc_feature (7)..(7): 2'-deoxy
  misc_feature (8)..(8): 2'-deoxy-2'-fluoro
  misc_feature (9)..(13): 2'-deoxy
  misc_feature (14)..(14): 2'-deoxy-2'-fluoro
  misc_feature (15)..(15): 2'-deoxy
  misc_feature (16)..(16): 2'-deoxy-2'-fluoro
  misc_feature (17)..(19): 2'-deoxy
  misc_feature (20)..(20): n stands for thymidine
  misc_feature (21)..(21): 3'-3 attached terminal deoxyabasic moeity
guuccugcaaaaacacagann

SEQ ID NO: 4032 - RNA, 21 nt, Artificial Sequence
  Description of Artificial Sequence:  siNA sense region
  misc_feature (1)..(5): 2'-deoxy-2'-fluoro
  misc_feature (1)..(1): 5'-3 attached terminal deoxyabasic moeity
  misc_feature (6)..(6): 2'-deoxy
  misc_feature (7)..(7): 2'-deoxy-2'-fluoro
  misc_feature (8)..(12): 2'-deoxy
  misc_feature (13)..(13): 2'-deoxy-2'-fluoro
  misc_feature (14)..(14): 2'-deoxy
  misc_feature (15)..(15): 2'-deoxy-2'-fluoro
  misc_feature (16)..(18): 2'-deoxy
  misc_feature (19)..(19): 2'-deoxy-2'-fluoro
  misc_feature (20)..(20): n stands for thymidine
  misc_feature (21)..(21): 3'-3 attached terminal deoxyabasic moeity
uuccugcaaaaacacagacnn

SEQ ID NO: 4033 - RNA, 21 nt, Artificial Sequence
  Description of Artificial Sequence:  siNA sense region
  misc_feature (1)..(1): 5'-3 attached terminal deoxyabasic moeity
  misc_feature (1)..(4): 2'-deoxy-2'-fluoro
  misc_feature (5)..(5): 2'-deoxy
  misc_feature (6)..(6): 2'-deoxy-2'-fluoro
  misc_feature (7)..(11): 2'-deoxy
  misc_feature (12)..(12): 2'-deoxy-2'-fluoro
  misc_feature (13)..(13): 2'-deoxy
  misc_feature (14)..(14): 2'-deoxy-2'-fluoro
  misc_feature (15)..(17): 2'-deoxy
  misc_feature (18)..(19): 2'-deoxy-2'-fluoro
  misc_feature (20)..(20): n stands for thymidine
  misc_feature (21)..(21): 3'-3 attached terminal deoxyabasic moeity
uccugcaaaaacacagacunn

SEQ ID NO: 4034 - RNA, 21 nt, Artificial Sequence
  Description of Artificial Sequence:  siNA sense region
  misc_feature (1)..(1): 2'-deoxy
  misc_feature (1)..(1): 5'-3 attached terminal deoxyabasic moeity
  misc_feature (2)..(2): 2'-deoxy-2'-fluoro
  misc_feature (3)..(7): 2'-deoxy
  misc_feature (8)..(8): 2'-deoxy-2'-fluoro
  misc_feature (9)..(9): 2'-deoxy
  misc_feature (10)..(10): 2'-deoxy-2'-fluoro
  misc_feature (11)..(13): 2'-deoxy
  misc_feature (14)..(16): 2'-deoxy-2'-fluoro
  misc_feature (17)..(17): 2'-deoxy
  misc_feature (18)..(18): 2'-deoxy-2'-fluoro
  misc_feature (19)..(19): 2'-deoxy
  misc_feature (20)..(20): n stands for thymidine
  misc_feature (21)..(21): 3'-3 attached terminal deoxyabasic moeity
gcaaaaacacagacucgcgnn

SEQ ID NO: 4035 - RNA, 21 nt, Artificial Sequence
  Description of Artificial Sequence:  siNA sense region
  misc_feature (1)..(1): 5'-3 attached terminal deoxyabasic moeity
  misc_feature (1)..(1): 2'-deoxy-2'-fluoro
  misc_feature (2)..(6): 2'-deoxy
  misc_feature (7)..(7): 2'-deoxy-2'-fluoro
  misc_feature (8)..(8): 2'-deoxy
  misc_feature (9)..(9): 2'-deoxy-2'-fluoro
  misc_feature (10)..(12): 2'-deoxy
  misc_feature (13)..(15): 2'-deoxy-2'-fluoro
  misc_feature (16)..(16): 2'-deoxy
  misc_feature (17)..(17): 2'-deoxy-2'-fluoro
  misc_feature (18)..(18): 2'-deoxy
  misc_feature (19)..(19): 2'-deoxy-2'-fluoro
  misc_feature (20)..(20): n stands for thymidine
  misc_feature (21)..(21): 3'-3 attached terminal deoxyabasic moeity
caaaaacacagacucgcgunn

SEQ ID NO: 4036 - RNA, 21 nt, Artificial Sequence
  Description of Artificial Sequence:  siNA sense region
  misc_feature (1)..(3): 2'-deoxy
  misc_feature (1)..(1): 5'-3 attached terminal deoxyabasic moeity
  misc_feature (4)..(4): 2'-deoxy-2'-fluoro
  misc_feature (5)..(5): 2'-deoxy
  misc_feature (6)..(6): 2'-deoxy-2'-fluoro
  misc_feature (7)..(9): 2'-deoxy
  misc_feature (10)..(12): 2'-deoxy-2'-fluoro
  misc_feature (13)..(13): 2'-deoxy
  misc_feature (14)..(14): 2'-deoxy-2'-fluoro
  misc_feature (15)..(15): 2'-deoxy
  misc_feature (16)..(17): 2'-deoxy-2'-fluoro
  misc_feature (18)..(18): 2'-deoxy
  misc_feature (19)..(19): 2'-deoxy-2'-fluoro
  misc_feature (20)..(20): n stands for thymidine
  misc_feature (21)..(21): 3'-3 attached terminal deoxyabasic moeity
aaacacagacucgcguugcnn

SEQ ID NO: 4037 - RNA, 21 nt, Artificial Sequence
  Description of Artificial Sequence:  siNA sense region
  misc_feature (1)..(1): 5'-3 attached terminal deoxyabasic moeity
  misc_feature (1)..(1): 2'-deoxy
  misc_feature (2)..(2): 2'-deoxy-2'-fluoro
  misc_feature (3)..(5): 2'-deoxy
  misc_feature (6)..(8): 2'-deoxy-2'-fluoro
  misc_feature (9)..(9): 2'-deoxy
  misc_feature (10)..(10): 2'-deoxy-2'-fluoro
  misc_feature (11)..(11): 2'-deoxy
  misc_feature (12)..(13): 2'-deoxy-2'-fluoro
  misc_feature (14)..(14): 2'-deoxy
  misc_feature (15)..(15): 2'-deoxy-2'-fluoro
  misc_feature (16)..(19): 2'-deoxy
  misc_feature (20)..(20): n stands for thymidine
  misc_feature (21)..(21): 3'-3 attached terminal deoxyabasic moeity
acagacucgcguugcaaggnn

SEQ ID NO: 4038 - RNA, 21 nt, Artificial Sequence
  Description of Artificial Sequence:  siNA sense region
  misc_feature (1)..(1): 2'-deoxy
  misc_feature (1)..(1): 5'-3 attached terminal deoxyabasic moeity
  misc_feature (2)..(4): 2'-deoxy-2'-fluoro
  misc_feature (5)..(5): 2'-deoxy
  misc_feature (6)..(6): 2'-deoxy-2'-fluoro
  misc_feature (7)..(7): 2'-deoxy
  misc_feature (8)..(9): 2'-deoxy-2'-fluoro
  misc_feature (10)..(10): 2'-deoxy
  misc_feature (11)..(11): 2'-deoxy-2'-fluoro
  misc_feature (12)..(15): 2'-deoxy
  misc_feature (16)..(16): 2'-deoxy-2'-fluoro
  misc_feature (17)..(19): 2'-deoxy
  misc_feature (20)..(20): n stands for thymidine
  misc_feature (21)..(21): 3'-3 attached terminal deoxyabasic moeity
acucgcguugcaaggcgagnn

SEQ ID NO: 4039 - RNA, 21 nt, Artificial Sequence
  Description of Artificial Sequence:  siNA sense region
  misc_feature (1)..(1): 5'-3 attached terminal deoxyabasic moeity
  misc_feature (1)..(1): 2'-deoxy
  misc_feature (2)..(3): 2'-deoxy-2'-fluoro
  misc_feature (4)..(4): 2'-deoxy
  misc_feature (5)..(5): 2'-deoxy-2'-fluoro
  misc_feature (6)..(9): 2'-deoxy
  misc_feature (10)..(10): 2'-deoxy-2'-fluoro
  misc_feature (11)..(14): 2'-deoxy
  misc_feature (15)..(15): 2'-deoxy-2'-fluoro
  misc_feature (16)..(17): 2'-deoxy
  misc_feature (18)..(19): 2'-deoxy-2'-fluoro
  misc_feature (20)..(20): n stands for thymidine
  misc_feature (21)..(21): 3'-3 attached terminal deoxyabasic moeity
guugcaaggcgaggcagcunn

SEQ ID NO: 4040 - RNA, 21 nt, Artificial Sequence
  Description of Artificial Sequence:  siNA sense region
  misc_feature (1)..(1): 2'-deoxy-2'-fluoro
  misc_feature (1)..(1): 5'-3 attached terminal deoxyabasic moeity
  misc_feature (2)..(5): 2'-deoxy
  misc_feature (6)..(6): 2'-deoxy-2'-fluoro
  misc_feature (7)..(10): 2'-deoxy
  misc_feature (11)..(11): 2'-deoxy-2'-fluoro
  misc_feature (12)..(13): 2'-deoxy
  misc_feature (14)..(16): 2'-deoxy-2'-fluoro
  misc_feature (17)..(19): 2'-deoxy
  misc_feature (20)..(20): n stands for thymidine
  misc_feature (21)..(21): 3'-3 attached terminal deoxyabasic moeity
caaggcgaggcagcuugagnn

SEQ ID NO: 4041 - RNA, 21 nt, Artificial Sequence
  Description of Artificial Sequence:  siNA sense region
  misc_feature (1)..(1): 5'-3 attached terminal deoxyabasic moeity
  misc_feature (1)..(3): 2'-deoxy
  misc_feature (4)..(4): 2'-deoxy-2'-fluoro
  misc_feature (5)..(8): 2'-deoxy
  misc_feature (9)..(9): 2'-deoxy-2'-fluoro
  misc_feature (10)..(11): 2'-deoxy
  misc_feature (12)..(14): 2'-deoxy-2'-fluoro
  misc_feature (15)..(17): 2'-deoxy
  misc_feature (18)..(19): 2'-deoxy-2'-fluoro
  misc_feature (20)..(20): n stands for thymidine
  misc_feature (21)..(21): 3'-3 attached terminal deoxyabasic moeity
aggcgaggcagcuugaguunn

SEQ ID NO: 4042 - RNA, 21 nt, Artificial Sequence
  Description of Artificial Sequence:  siNA sense region
  misc_feature (1)..(3): 2'-deoxy
  misc_feature (1)..(1): 5'-3 attached terminal deoxyabasic moeity
  misc_feature (4)..(4): 2'-deoxy-2'-fluoro
  misc_feature (5)..(6): 2'-deoxy
  misc_feature (7)..(9): 2'-deoxy-2'-fluoro
  misc_feature (10)..(12): 2'-deoxy
  misc_feature (13)..(14): 2'-deoxy-2'-fluoro
  misc_feature (15)..(17): 2'-deoxy
  misc_feature (18)..(18): 2'-deoxy-2'-fluoro
  misc_feature (19)..(19): 2'-deoxy
  misc_feature (20)..(20): n stands for thymidine
  misc_feature (21)..(21): 3'-3 attached terminal deoxyabasic moeity
aggcagcuugaguuaaacgnn

SEQ ID NO: 4043 - RNA, 21 nt, Artificial Sequence
  Description of Artificial Sequence:  siNA sense region
  misc_feature (1)..(1): 5'-3 attached terminal deoxyabasic moeity
  misc_feature (1)..(2): 2'-deoxy
  misc_feature (3)..(3): 2'-deoxy-2'-fluoro
  misc_feature (4)..(5): 2'-deoxy
  misc_feature (6)..(8): 2'-deoxy-2'-fluoro
  misc_feature (9)..(11): 2'-deoxy
  misc_feature (12)..(13): 2'-deoxy-2'-fluoro
  misc_feature (14)..(16): 2'-deoxy
  misc_feature (17)..(17): 2'-deoxy-2'-fluoro
  misc_feature (18)..(19): 2'-deoxy
  misc_feature (20)..(20): n stands for thymidine
  misc_feature (21)..(21): 3'-3 attached terminal deoxyabasic moeity
ggcagcuugaguuaaacgann

SEQ ID NO: 4044 - RNA, 21 nt, Artificial Sequence
  Description of Artificial Sequence:  siNA sense region
  misc_feature (1)..(1): 2'-deoxy
  misc_feature (1)..(1): 5'-3 attached terminal deoxyabasic moeity
  misc_feature (2)..(2): 2'-deoxy-2'-fluoro
  misc_feature (3)..(4): 2'-deoxy
  misc_feature (5)..(7): 2'-deoxy-2'-fluoro
  misc_feature (8)..(10): 2'-deoxy
  misc_feature (11)..(12): 2'-deoxy-2'-fluoro
  misc_feature (13)..(15): 2'-deoxy
  misc_feature (16)..(16): 2'-deoxy-2'-fluoro
  misc_feature (17)..(19): 2'-deoxy
  misc_feature (20)..(20): n stands for thymidine
  misc_feature (21)..(21): 3'-3 attached terminal deoxyabasic moeity
gcagcuugaguuaaacgaann

SEQ ID NO: 4045 - RNA, 21 nt, Artificial Sequence
  Description of Artificial Sequence:  siNA sense region
  misc_feature (1)..(1): 5'-3 attached terminal deoxyabasic moeity
  misc_feature (1)..(2): 2'-deoxy
  misc_feature (3)..(5): 2'-deoxy-2'-fluoro
  misc_feature (6)..(8): 2'-deoxy
  misc_feature (9)..(10): 2'-deoxy-2'-fluoro
  misc_feature (11)..(13): 2'-deoxy
  misc_feature (14)..(14): 2'-deoxy-2'-fluoro
  misc_feature (15)..(17): 2'-deoxy
  misc_feature (18)..(18): 2'-deoxy-2'-fluoro
  misc_feature (19)..(19): 2'-deoxy
  misc_feature (20)..(20): n stands for thymidine
  misc_feature (21)..(21): 3'-3 attached terminal deoxyabasic moeity
agcuugaguuaaacgaacgnn

SEQ ID NO: 4046 - RNA, 21 nt, Artificial Sequence
  Description of Artificial Sequence:  siNA sense region
  misc_feature (1)..(2): 2'-deoxy
  misc_feature (1)..(1): 5'-3 attached terminal deoxyabasic moeity
  misc_feature (3)..(4): 2'-deoxy-2'-fluoro
  misc_feature (5)..(7): 2'-deoxy
  misc_feature (8)..(8): 2'-deoxy-2'-fluoro
  misc_feature (9)..(11): 2'-deoxy
  misc_feature (12)..(12): 2'-deoxy-2'-fluoro
  misc_feature (13)..(13): 2'-deoxy
  misc_feature (14)..(14): 2'-deoxy-2'-fluoro
  misc_feature (15)..(15): 2'-deoxy
  misc_feature (16)..(18): 2'-deoxy-2'-fluoro
  misc_feature (19)..(19): 2'-deoxy
  misc_feature (20)..(20): n stands for thymidine
  misc_feature (21)..(21): 3'-3 attached terminal deoxyabasic moeity
aguuaaacgaacguacuugnn

SEQ ID NO: 4047 - RNA, 21 nt, Artificial Sequence
  Description of Artificial Sequence:  siNA sense region
  misc_feature (1)..(1): 5'-3 attached terminal deoxyabasic moeity
  misc_feature (1)..(2): 2'-deoxy-2'-fluoro
  misc_feature (3)..(5): 2'-deoxy
  misc_feature (6)..(6): 2'-deoxy-2'-fluoro
  misc_feature (7)..(9): 2'-deoxy
  misc_feature (10)..(10): 2'-deoxy-2'-fluoro
  misc_feature (11)..(11): 2'-deoxy
  misc_feature (12)..(12): 2'-deoxy-2'-fluoro
  misc_feature (13)..(13): 2'-deoxy
  misc_feature (14)..(16): 2'-deoxy-2'-fluoro
  misc_feature (17)..(17): 2'-deoxy
  misc_feature (18)..(18): 2'-deoxy-2'-fluoro
  misc_feature (19)..(19): 2'-deoxy
  misc_feature (20)..(20): n stands for thymidine
  misc_feature (21)..(21): 3'-3 attached terminal deoxyabasic moeity
uuaaacgaacguacuugcann

SEQ ID NO: 4048 - RNA, 21 nt, Artificial Sequence
  Description of Artificial Sequence:  siNA sense region
  misc_feature (1)..(1): 2'-deoxy-2'-fluoro
  misc_feature (1)..(1): 5'-3 attached terminal deoxyabasic moeity
  misc_feature (2)..(4): 2'-deoxy
  misc_feature (5)..(5): 2'-deoxy-2'-fluoro
  misc_feature (6)..(8): 2'-deoxy
  misc_feature (9)..(9): 2'-deoxy-2'-fluoro
  misc_feature (10)..(10): 2'-deoxy
  misc_feature (11)..(11): 2'-deoxy-2'-fluoro
  misc_feature (12)..(12): 2'-deoxy
  misc_feature (13)..(15): 2'-deoxy-2'-fluoro
  misc_feature (16)..(16): 2'-deoxy
  misc_feature (17)..(17): 2'-deoxy-2'-fluoro
  misc_feature (18)..(19): 2'-deoxy
  misc_feature (20)..(20): n stands for thymidine
  misc_feature (21)..(21): 3'-3 attached terminal deoxyabasic moeity
uaaacgaacguacuugcagnn

SEQ ID NO: 4049 - RNA, 21 nt, Artificial Sequence
  Description of Artificial Sequence:  siNA sense region
  misc_feature (1)..(1): 5'-3 attached terminal deoxyabasic moeity
  misc_feature (1)..(3): 2'-deoxy
  misc_feature (4)..(4): 2'-deoxy-2'-fluoro
  misc_feature (5)..(7): 2'-deoxy
  misc_feature (8)..(8): 2'-deoxy-2'-fluoro
  misc_feature (9)..(9): 2'-deoxy
  misc_feature (10)..(10): 2'-deoxy-2'-fluoro
  misc_feature (11)..(11): 2'-deoxy
  misc_feature (12)..(14): 2'-deoxy-2'-fluoro
  misc_feature (15)..(15): 2'-deoxy
  misc_feature (16)..(16): 2'-deoxy-2'-fluoro
  misc_feature (17)..(19): 2'-deoxy
  misc_feature (20)..(20): n stands for thymidine
  misc_feature (21)..(21): 3'-3 attached terminal deoxyabasic moeity
aaacgaacguacuugcagann

SEQ ID NO: 4050 - RNA, 21 nt, Artificial Sequence
  Description of Artificial Sequence:  siNA sense region
  misc_feature (1)..(2): 2'-deoxy
  misc_feature (1)..(1): 5'-3 attached terminal deoxyabasic moeity
  misc_feature (3)..(3): 2'-deoxy-2'-fluoro
  misc_feature (4)..(6): 2'-deoxy
  misc_feature (7)..(7): 2'-deoxy-2'-fluoro
  misc_feature (8)..(8): 2'-deoxy
  misc_feature (9)..(9): 2'-deoxy-2'-fluoro
  misc_feature (10)..(10): 2'-deoxy
  misc_feature (11)..(13): 2'-deoxy-2'-fluoro
  misc_feature (14)..(14): 2'-deoxy
  misc_feature (15)..(15): 2'-deoxy-2'-fluoro
  misc_feature (16)..(18): 2'-deoxy
  misc_feature (19)..(19): 2'-deoxy-2'-fluoro
  misc_feature (20)..(20): n stands for thymidine
  misc_feature (21)..(21): 3'-3 attached terminal deoxyabasic moeity
aacgaacguacuugcagaunn

SEQ ID NO: 4051 - RNA, 21 nt, Artificial Sequence
  Description of Artificial Sequence:  siNA sense region
  misc_feature (1)..(1): 5'-3 attached terminal deoxyabasic moeity
  misc_feature (1)..(1): 2'-deoxy
  misc_feature (2)..(2): 2'-deoxy-2'-fluoro
  misc_feature (3)..(3): 2'-deoxy
  misc_feature (4)..(6): 2'-deoxy-2'-fluoro
  misc_feature (7)..(7): 2'-deoxy
  misc_feature (8)..(8): 2'-deoxy-2'-fluoro
  misc_feature (9)..(11): 2'-deoxy
  misc_feature (12)..(12): 2'-deoxy-2'-fluoro
  misc_feature (13)..(13): 2'-deoxy
  misc_feature (14)..(14): 2'-deoxy-2'-fluoro
  misc_feature (15)..(16): 2'-deoxy
  misc_feature (17)..(17): 2'-deoxy-2'-fluoro
  misc_feature (18)..(19): 2'-deoxy
  misc_feature (20)..(20): n stands for thymidine
  misc_feature (21)..(21): 3'-3 attached terminal deoxyabasic moeity
guacuugcagaugugacaann

SEQ ID NO: 4052 - RNA, 21 nt, Artificial Sequence
  Description of Artificial Sequence:  siNA sense region
  misc_feature (1)..(1): 2'-deoxy-2'-fluoro
  misc_feature (1)..(1): 5'-3 attached terminal deoxyabasic moeity
  misc_feature (2)..(2): 2'-deoxy
  misc_feature (3)..(5): 2'-deoxy-2'-fluoro
  misc_feature (6)..(6): 2'-deoxy
  misc_feature (7)..(7): 2'-deoxy-2'-fluoro
  misc_feature (8)..(10): 2'-deoxy
  misc_feature (11)..(11): 2'-deoxy-2'-fluoro
  misc_feature (12)..(12): 2'-deoxy
  misc_feature (13)..(13): 2'-deoxy-2'-fluoro
  misc_feature (14)..(15): 2'-deoxy
  misc_feature (16)..(16): 2'-deoxy-2'-fluoro
  misc_feature (17)..(19): 2'-deoxy
  misc_feature (20)..(20): n stands for thymidine
  misc_feature (21)..(21): 3'-3 attached terminal deoxyabasic moeity
uacuugcagaugugacaagnn

SEQ ID NO: 4053 - RNA, 21 nt, Artificial Sequence
  Description of Artificial Sequence:  siNA sense region
  misc_feature (1)..(1): 5'-3 attached terminal deoxyabasic moeity
  misc_feature (1)..(1): 2'-deoxy
  misc_feature (2)..(4): 2'-deoxy-2'-fluoro
  misc_feature (5)..(5): 2'-deoxy
  misc_feature (6)..(6): 2'-deoxy-2'-fluoro
  misc_feature (7)..(9): 2'-deoxy
  misc_feature (10)..(10): 2'-deoxy-2'-fluoro
  misc_feature (11)..(11): 2'-deoxy
  misc_feature (12)..(12): 2'-deoxy-2'-fluoro
  misc_feature (13)..(14): 2'-deoxy
  misc_feature (15)..(15): 2'-deoxy-2'-fluoro
  misc_feature (16)..(18): 2'-deoxy
  misc_feature (19)..(19): 2'-deoxy-2'-fluoro
  misc_feature (20)..(20): n stands for thymidine
  misc_feature (21)..(21): 3'-3 attached terminal deoxyabasic moeity
acuugcagaugugacaagcnn

SEQ ID NO: 4054 - RNA, 21 nt, Artificial Sequence
  Description of Artificial Sequence:  siNA antisense region
  misc_feature (4)..(6): 2'-deoxy-2'-fluoro
  misc_feature (7)..(8): 2'-O-methyl
  misc_feature (9)..(9): 2'-deoxy-2'-fluoro
  misc_feature (10)..(10): 2'-O-methyl
  misc_feature (11)..(11): 2'-deoxy-2'-fluoro
  misc_feature (12)..(13): 2'-O-methyl
  misc_feature (14)..(14): 2'-deoxy-2'-fluoro
  misc_feature (15)..(19): 2'-O-methyl
  misc_feature (20)..(21): n stands for thymidine
ccacuuggcaugguggaggnn

SEQ ID NO: 4055 - RNA, 21 nt, Artificial Sequence
  Description of Artificial Sequence:  siNA antisense region
  misc_feature (4)..(4): 2'-O-methyl
  misc_feature (5)..(7): 2'-deoxy-2'-fluoro
  misc_feature (8)..(9): 2'-O-methyl
  misc_feature (10)..(10): 2'-deoxy-2'-fluoro
  misc_feature (11)..(11): 2'-O-methyl
  misc_feature (12)..(12): 2'-deoxy-2'-fluoro
  misc_feature (13)..(14): 2'-O-methyl
  misc_feature (15)..(15): 2'-deoxy-2'-fluoro
  misc_feature (16)..(19): 2'-O-methyl
  misc_feature (20)..(21): n stands for thymidine
accacuuggcaugguggagnn

SEQ ID NO: 4056 - RNA, 21 nt, Artificial Sequence
  Description of Artificial Sequence:  siNA antisense region
  misc_feature (4)..(6): 2'-O-methyl
  misc_feature (7)..(8): 2'-deoxy-2'-fluoro
  misc_feature (9)..(9): 2'-O-methyl
  misc_feature (10)..(12): 2'-deoxy-2'-fluoro
  misc_feature (13)..(14): 2'-O-methyl
  misc_feature (15)..(15): 2'-deoxy-2'-fluoro
  misc_feature (16)..(16): 2'-O-methyl
  misc_feature (17)..(17): 2'-deoxy-2'-fluoro
  misc_feature (18)..(19): 2'-O-methyl
  misc_feature (20)..(21): n stands for thymidine
cugggaccacuuggcauggnn

SEQ ID NO: 4057 - RNA, 21 nt, Artificial Sequence
  Description of Artificial Sequence:  siNA antisense region
  misc_feature (4)..(7): 2'-O-methyl
  misc_feature (8)..(9): 2'-deoxy-2'-fluoro
  misc_feature (10)..(10): 2'-O-methyl
  misc_feature (11)..(13): 2'-deoxy-2'-fluoro
  misc_feature (14)..(15): 2'-O-methyl
  misc_feature (16)..(16): 2'-deoxy-2'-fluoro
  misc_feature (17)..(17): 2'-O-methyl
  misc_feature (18)..(18): 2'-deoxy-2'-fluoro
  misc_feature (19)..(19): 2'-O-methyl
  misc_feature (20)..(21): n stands for thymidine
ccugggaccacuuggcaugnn

SEQ ID NO: 4058 - RNA, 21 nt, Artificial Sequence
  Description of Artificial Sequence:  siNA antisense region
  misc_feature (4)..(4): 2'-deoxy-2'-fluoro
  misc_feature (5)..(8): 2'-O-methyl
  misc_feature (9)..(10): 2'-deoxy-2'-fluoro
  misc_feature (11)..(11): 2'-O-methyl
  misc_feature (12)..(14): 2'-deoxy-2'-fluoro
  misc_feature (15)..(16): 2'-O-methyl
  misc_feature (17)..(17): 2'-deoxy-2'-fluoro
  misc_feature (18)..(18): 2'-O-methyl
  misc_feature (19)..(19): 2'-deoxy-2'-fluoro
  misc_feature (20)..(21): n stands for thymidine
gccugggaccacuuggcaunn

SEQ ID NO: 4059 - RNA, 21 nt, Artificial Sequence
  Description of Artificial Sequence:  siNA antisense region
  misc_feature (4)..(5): 2'-deoxy-2'-fluoro
  misc_feature (6)..(9): 2'-O-methyl
  misc_feature (10)..(11): 2'-deoxy-2'-fluoro
  misc_feature (12)..(12): 2'-O-methyl
  misc_feature (13)..(15): 2'-deoxy-2'-fluoro
  misc_feature (16)..(17): 2'-O-methyl
  misc_feature (18)..(18): 2'-deoxy-2'-fluoro
  misc_feature (19)..(19): 2'-O-methyl
  misc_feature (20)..(21): n stands for thymidine
agccugggaccacuuggcann

SEQ ID NO: 4060 - RNA, 21 nt, Artificial Sequence
  Description of Artificial Sequence:  siNA antisense region
  misc_feature (4)..(6): 2'-deoxy-2'-fluoro
  misc_feature (7)..(10): 2'-O-methyl
  misc_feature (11)..(12): 2'-deoxy-2'-fluoro
  misc_feature (13)..(13): 2'-O-methyl
  misc_feature (14)..(16): 2'-deoxy-2'-fluoro
  misc_feature (17)..(18): 2'-O-methyl
  misc_feature (19)..(19): 2'-deoxy-2'-fluoro
  misc_feature (20)..(21): n stands for thymidine
cagccugggaccacuuggcnn

SEQ ID NO: 4061 - RNA, 21 nt, Artificial Sequence
  Description of Artificial Sequence:  siNA antisense region
  misc_feature (4)..(4): 2'-O-methyl
  misc_feature (5)..(7): 2'-deoxy-2'-fluoro
  misc_feature (8)..(11): 2'-O-methyl
  misc_feature (12)..(13): 2'-deoxy-2'-fluoro
  misc_feature (14)..(14): 2'-O-methyl
  misc_feature (15)..(17): 2'-deoxy-2'-fluoro
  misc_feature (18)..(19): 2'-O-methyl
  misc_feature (20)..(21): n stands for thymidine
gcagccugggaccacuuggnn

SEQ ID NO: 4062 - RNA, 21 nt, Artificial Sequence
  Description of Artificial Sequence:  siNA antisense region
  misc_feature (4)..(4): 2'-deoxy-2'-fluoro
  misc_feature (5)..(5): 2'-O-methyl
  misc_feature (6)..(6): 2'-deoxy-2'-fluoro
  misc_feature (7)..(8): 2'-O-methyl
  misc_feature (9)..(11): 2'-deoxy-2'-fluoro
  misc_feature (12)..(15): 2'-O-methyl
  misc_feature (16)..(17): 2'-deoxy-2'-fluoro
  misc_feature (18)..(18): 2'-O-methyl
  misc_feature (19)..(19): 2'-deoxy-2'-fluoro
  misc_feature (20)..(21): n stands for thymidine
gggugcagccugggaccacnn

SEQ ID NO: 4063 - RNA, 21 nt, Artificial Sequence
  Description of Artificial Sequence:  siNA antisense region
  misc_feature (4)..(4): 2'-O-methyl
  misc_feature (5)..(5): 2'-deoxy-2'-fluoro
  misc_feature (6)..(6): 2'-O-methyl
  misc_feature (7)..(7): 2'-deoxy-2'-fluoro
  misc_feature (8)..(9): 2'-O-methyl
  misc_feature (10)..(12): 2'-deoxy-2'-fluoro
  misc_feature (13)..(16): 2'-O-methyl
  misc_feature (17)..(18): 2'-deoxy-2'-fluoro
  misc_feature (19)..(19): 2'-O-methyl
  misc_feature (20)..(21): n stands for thymidine
ugggugcagccugggaccann

SEQ ID NO: 4064 - RNA, 21 nt, Artificial Sequence
  Description of Artificial Sequence:  siNA antisense region
  misc_feature (4)..(7): 2'-O-methyl
  misc_feature (8)..(8): 2'-deoxy-2'-fluoro
  misc_feature (9)..(9): 2'-O-methyl
  misc_feature (10)..(12): 2'-deoxy-2'-fluoro
  misc_feature (13)..(13): 2'-O-methyl
  misc_feature (14)..(15): 2'-deoxy-2'-fluoro
  misc_feature (16)..(19): 2'-O-methyl
  misc_feature (20)..(21): n stands for thymidine
uggaagauguccaccagggnn

SEQ ID NO: 4065 - RNA, 21 nt, Artificial Sequence
  Description of Artificial Sequence:  siNA antisense region
  misc_feature (4)..(7): 2'-deoxy-2'-fluoro
  misc_feature (8)..(13): 2'-O-methyl
  misc_feature (14)..(14): 2'-deoxy-2'-fluoro
  misc_feature (15)..(15): 2'-O-methyl
  misc_feature (16)..(18): 2'-deoxy-2'-fluoro
  misc_feature (19)..(19): 2'-O-methyl
  misc_feature (20)..(21): n stands for thymidine
uacuccuggaagauguccann

SEQ ID NO: 4066 - RNA, 21 nt, Artificial Sequence
  Description of Artificial Sequence:  siNA antisense region
  misc_feature (4)..(6): 2'-deoxy-2'-fluoro
  misc_feature (7)..(8): 2'-O-methyl
  misc_feature (9)..(11): 2'-deoxy-2'-fluoro
  misc_feature (12)..(12): 2'-O-methyl
  misc_feature (13)..(13): 2'-deoxy-2'-fluoro
  misc_feature (14)..(14): 2'-O-methyl
  misc_feature (15)..(17): 2'-deoxy-2'-fluoro
  misc_feature (18)..(18): 2'-O-methyl
  misc_feature (19)..(19): 2'-deoxy-2'-fluoro
  misc_feature (20)..(21): n stands for thymidine
uucuuuggucugcauucacnn

SEQ ID NO: 4067 - RNA, 21 nt, Artificial Sequence
  Description of Artificial Sequence:  siNA antisense region
  misc_feature (4)..(8): 2'-deoxy-2'-fluoro
  misc_feature (9)..(10): 2'-O-methyl
  misc_feature (11)..(13): 2'-deoxy-2'-fluoro
  misc_feature (14)..(14): 2'-O-methyl
  misc_feature (15)..(15): 2'-deoxy-2'-fluoro
  misc_feature (16)..(16): 2'-O-methyl
  misc_feature (17)..(19): 2'-deoxy-2'-fluoro
  misc_feature (20)..(21): n stands for thymidine
cuuucuuuggucugcauucnn

SEQ ID NO: 4068 - RNA, 21 nt, Artificial Sequence
  Description of Artificial Sequence:  siNA antisense region
  misc_feature (4)..(9): 2'-deoxy-2'-fluoro
  misc_feature (10)..(11): 2'-O-methyl
  misc_feature (12)..(14): 2'-deoxy-2'-fluoro
  misc_feature (15)..(15): 2'-O-methyl
  misc_feature (16)..(16): 2'-deoxy-2'-fluoro
  misc_feature (17)..(17): 2'-O-methyl
  misc_feature (18)..(19): 2'-deoxy-2'-fluoro
  misc_feature (20)..(21): n stands for thymidine
ucuuucuuuggucugcauunn

SEQ ID NO: 4069 - RNA, 21 nt, Artificial Sequence
  Description of Artificial Sequence:  siNA antisense region
  misc_feature (4)..(4): 2'-O-methyl
  misc_feature (5)..(12): 2'-deoxy-2'-fluoro
  misc_feature (13)..(13): 2'-O-methyl
  misc_feature (14)..(17): 2'-deoxy-2'-fluoro
  misc_feature (18)..(19): 2'-O-methyl
  misc_feature (20)..(21): n stands for thymidine
aaugcuuucuccgcucugann

SEQ ID NO: 4070 - RNA, 21 nt, Artificial Sequence
  Description of Artificial Sequence:  siNA antisense region
  misc_feature (4)..(4): 2'-O-methyl
  misc_feature (5)..(5): 2'-deoxy-2'-fluoro
  misc_feature (6)..(6): 2'-O-methyl
  misc_feature (7)..(9): 2'-deoxy-2'-fluoro
  misc_feature (10)..(10): 2'-O-methyl
  misc_feature (11)..(11): 2'-deoxy-2'-fluoro
  misc_feature (12)..(12): 2'-O-methyl
  misc_feature (13)..(13): 2'-deoxy-2'-fluoro
  misc_feature (14)..(14): 2'-O-methyl
  misc_feature (15)..(17): 2'-deoxy-2'-fluoro
  misc_feature (18)..(18): 2'-O-methyl
  misc_feature (19)..(19): 2'-deoxy-2'-fluoro
  misc_feature (20)..(21): n stands for thymidine
ggaacauuuacacgucugcnn

SEQ ID NO: 4071 - RNA, 21 nt, Artificial Sequence
  Description of Artificial Sequence:  siNA antisense region
  misc_feature (4)..(5): 2'-O-methyl
  misc_feature (6)..(6): 2'-deoxy-2'-fluoro
  misc_feature (7)..(7): 2'-O-methyl
  misc_feature (8)..(10): 2'-deoxy-2'-fluoro
  misc_feature (11)..(11): 2'-O-methyl
  misc_feature (12)..(12): 2'-deoxy-2'-fluoro
  misc_feature (13)..(13): 2'-O-methyl
  misc_feature (14)..(14): 2'-deoxy-2'-fluoro
  misc_feature (15)..(15): 2'-O-methyl
  misc_feature (16)..(18): 2'-deoxy-2'-fluoro
  misc_feature (19)..(19): 2'-O-methyl
  misc_feature (20)..(21): n stands for thymidine
aggaacauuuacacgucugnn

SEQ ID NO: 4072 - RNA, 21 nt, Artificial Sequence
  Description of Artificial Sequence:  siNA antisense region
  misc_feature (4)..(4): 2'-deoxy-2'-fluoro
  misc_feature (5)..(9): 2'-O-methyl
  misc_feature (10)..(10): 2'-deoxy-2'-fluoro
  misc_feature (11)..(11): 2'-O-methyl
  misc_feature (12)..(14): 2'-deoxy-2'-fluoro
  misc_feature (15)..(15): 2'-O-methyl
  misc_feature (16)..(16): 2'-deoxy-2'-fluoro
  misc_feature (17)..(17): 2'-O-methyl
  misc_feature (18)..(18): 2'-deoxy-2'-fluoro
  misc_feature (19)..(19): 2'-O-methyl
  misc_feature (20)..(21): n stands for thymidine
uugcaggaacauuuacacgnn

SEQ ID NO: 4073 - RNA, 21 nt, Artificial Sequence
  Description of Artificial Sequence:  siNA antisense region
  misc_feature (4)..(4): 2'-deoxy-2'-fluoro
  misc_feature (5)..(5): 2'-O-methyl
  misc_feature (6)..(6): 2'-deoxy-2'-fluoro
  misc_feature (7)..(11): 2'-O-methyl
  misc_feature (12)..(12): 2'-deoxy-2'-fluoro
  misc_feature (13)..(13): 2'-O-methyl
  misc_feature (14)..(16): 2'-deoxy-2'-fluoro
  misc_feature (17)..(17): 2'-O-methyl
  misc_feature (18)..(18): 2'-deoxy-2'-fluoro
  misc_feature (19)..(19): 2'-O-methyl
  misc_feature (20)..(21): n stands for thymidine
uuuugcaggaacauuuacann

SEQ ID NO: 4074 - RNA, 21 nt, Artificial Sequence
  Description of Artificial Sequence:  siNA antisense region
  misc_feature (4)..(5): 2'-deoxy-2'-fluoro
  misc_feature (6)..(6): 2'-O-methyl
  misc_feature (7)..(7): 2'-deoxy-2'-fluoro
  misc_feature (8)..(12): 2'-O-methyl
  misc_feature (13)..(13): 2'-deoxy-2'-fluoro
  misc_feature (14)..(14): 2'-O-methyl
  misc_feature (15)..(17): 2'-deoxy-2'-fluoro
  misc_feature (18)..(18): 2'-O-methyl
  misc_feature (19)..(19): 2'-deoxy-2'-fluoro
  misc_feature (20)..(21): n stands for thymidine
uuuuugcaggaacauuuacnn

SEQ ID NO: 4075 - RNA, 21 nt, Artificial Sequence
  Description of Artificial Sequence:  siNA antisense region
  misc_feature (4)..(6): 2'-deoxy-2'-fluoro
  misc_feature (7)..(7): 2'-O-methyl
  misc_feature (8)..(8): 2'-deoxy-2'-fluoro
  misc_feature (9)..(13): 2'-O-methyl
  misc_feature (14)..(14): 2'-deoxy-2'-fluoro
  misc_feature (15)..(15): 2'-O-methyl
  misc_feature (16)..(18): 2'-deoxy-2'-fluoro
  misc_feature (19)..(19): 2'-O-methyl
  misc_feature (20)..(21): n stands for thymidine
guuuuugcaggaacauuuann

SEQ ID NO: 4076 - RNA, 21 nt, Artificial Sequence
  Description of Artificial Sequence:  siNA antisense region
  misc_feature (4)..(7): 2'-deoxy-2'-fluoro
  misc_feature (8)..(8): 2'-O-methyl
  misc_feature (9)..(9): 2'-deoxy-2'-fluoro
  misc_feature (10)..(14): 2'-O-methyl
  misc_feature (15)..(15): 2'-deoxy-2'-fluoro
  misc_feature (16)..(16): 2'-O-methyl
  misc_feature (17)..(19): 2'-deoxy-2'-fluoro
  misc_feature (20)..(21): n stands for thymidine
uguuuuugcaggaacauuunn

SEQ ID NO: 4077 - RNA, 21 nt, Artificial Sequence
  Description of Artificial Sequence:  siNA antisense region
  misc_feature (4)..(8): 2'-deoxy-2'-fluoro
  misc_feature (9)..(9): 2'-O-methyl
  misc_feature (10)..(10): 2'-deoxy-2'-fluoro
  misc_feature (11)..(15): 2'-O-methyl
  misc_feature (16)..(16): 2'-deoxy-2'-fluoro
  misc_feature (17)..(17): 2'-O-methyl
  misc_feature (18)..(19): 2'-deoxy-2'-fluoro
  misc_feature (20)..(21): n stands for thymidine
guguuuuugcaggaacauunn

SEQ ID NO: 4078 - RNA, 21 nt, Artificial Sequence
  Description of Artificial Sequence:  siNA antisense region
  misc_feature (4)..(4): 2'-deoxy-2'-fluoro
  misc_feature (5)..(5): 2'-O-methyl
  misc_feature (6)..(10): 2'-deoxy-2'-fluoro
  misc_feature (11)..(11): 2'-O-methyl
  misc_feature (12)..(12): 2'-deoxy-2'-fluoro
  misc_feature (13)..(17): 2'-O-methyl
  misc_feature (18)..(18): 2'-deoxy-2'-fluoro
  misc_feature (19)..(19): 2'-O-methyl
  misc_feature (20)..(21): n stands for thymidine
cuguguuuuugcaggaacann

SEQ ID NO: 4079 - RNA, 21 nt, Artificial Sequence
  Description of Artificial Sequence:  siNA antisense region
  misc_feature (4)..(4): 2'-O-methyl
  misc_feature (5)..(5): 2'-deoxy-2'-fluoro
  misc_feature (6)..(6): 2'-O-methyl
  misc_feature (7)..(11): 2'-deoxy-2'-fluoro
  misc_feature (12)..(12): 2'-O-methyl
  misc_feature (13)..(13): 2'-deoxy-2'-fluoro
  misc_feature (14)..(18): 2'-O-methyl
  misc_feature (19)..(19): 2'-deoxy-2'-fluoro
  misc_feature (20)..(21): n stands for thymidine
ucuguguuuuugcaggaacnn

SEQ ID NO: 4080 - RNA, 21 nt, Artificial Sequence
  Description of Artificial Sequence:  siNA antisense region
  misc_feature (4)..(4): 2'-deoxy-2'-fluoro
  misc_feature (5)..(5): 2'-O-methyl
  misc_feature (6)..(6): 2'-deoxy-2'-fluoro
  misc_feature (7)..(7): 2'-O-methyl
  misc_feature (8)..(12): 2'-deoxy-2'-fluoro
  misc_feature (13)..(13): 2'-O-methyl
  misc_feature (14)..(14): 2'-deoxy-2'-fluoro
  misc_feature (15)..(19): 2'-O-methyl
  misc_feature (20)..(21): n stands for thymidine
gucuguguuuuugcaggaann

SEQ ID NO: 4081 - RNA, 21 nt, Artificial Sequence
  Description of Artificial Sequence:  siNA antisense region
  misc_feature (4)..(5): 2'-deoxy-2'-fluoro
  misc_feature (6)..(6): 2'-O-methyl
  misc_feature (7)..(7): 2'-deoxy-2'-fluoro
  misc_feature (8)..(8): 2'-O-methyl
  misc_feature (9)..(13): 2'-deoxy-2'-fluoro
  misc_feature (14)..(14): 2'-O-methyl
  misc_feature (15)..(15): 2'-deoxy-2'-fluoro
  misc_feature (16)..(19): 2'-O-methyl
  misc_feature (20)..(21): n stands for thymidine
agucuguguuuuugcaggann

SEQ ID NO: 4082 - RNA, 21 nt, Artificial Sequence
  Description of Artificial Sequence:  siNA antisense region
  misc_feature (4)..(6): 2'-O-methyl
  misc_feature (7)..(9): 2'-deoxy-2'-fluoro
  misc_feature (10)..(10): 2'-O-methyl
  misc_feature (11)..(11): 2'-deoxy-2'-fluoro
  misc_feature (12)..(12): 2'-O-methyl
  misc_feature (13)..(17): 2'-deoxy-2'-fluoro
  misc_feature (18)..(18): 2'-O-methyl
  misc_feature (19)..(19): 2'-deoxy-2'-fluoro
  misc_feature (20)..(21): n stands for thymidine
cgcgagucuguguuuuugcnn

SEQ ID NO: 4083 - RNA, 21 nt, Artificial Sequence
  Description of Artificial Sequence:  siNA antisense region
  misc_feature (4)..(4): 2'-deoxy-2'-fluoro
  misc_feature (5)..(7): 2'-O-methyl
  misc_feature (8)..(10): 2'-deoxy-2'-fluoro
  misc_feature (11)..(11): 2'-O-methyl
  misc_feature (12)..(12): 2'-deoxy-2'-fluoro
  misc_feature (13)..(13): 2'-O-methyl
  misc_feature (14)..(18): 2'-deoxy-2'-fluoro
  misc_feature (19)..(19): 2'-O-methyl
  misc_feature (20)..(21): n stands for thymidine
acgcgagucuguguuuuugnn

SEQ ID NO: 4084 - RNA, 21 nt, Artificial Sequence
  Description of Artificial Sequence:  siNA antisense region
  misc_feature (4)..(4): 2'-O-methyl
  misc_feature (5)..(5): 2'-deoxy-2'-fluoro
  misc_feature (6)..(6): 2'-O-methyl
  misc_feature (7)..(7): 2'-deoxy-2'-fluoro
  misc_feature (8)..(10): 2'-O-methyl
  misc_feature (11)..(13): 2'-deoxy-2'-fluoro
  misc_feature (14)..(14): 2'-O-methyl
  misc_feature (15)..(15): 2'-deoxy-2'-fluoro
  misc_feature (16)..(16): 2'-O-methyl
  misc_feature (17)..(19): 2'-deoxy-2'-fluoro
  misc_feature (20)..(21): n stands for thymidine
gcaacgcgagucuguguuunn

SEQ ID NO: 4085 - RNA, 21 nt, Artificial Sequence
  Description of Artificial Sequence:  siNA antisense region
  misc_feature (4)..(4): 2'-deoxy-2'-fluoro
  misc_feature (5)..(5): 2'-O-methyl
  misc_feature (6)..(6): 2'-deoxy-2'-fluoro
  misc_feature (7)..(8): 2'-O-methyl
  misc_feature (9)..(9): 2'-deoxy-2'-fluoro
  misc_feature (10)..(10): 2'-O-methyl
  misc_feature (11)..(11): 2'-deoxy-2'-fluoro
  misc_feature (12)..(14): 2'-O-methyl
  misc_feature (15)..(17): 2'-deoxy-2'-fluoro
  misc_feature (18)..(18): 2'-O-methyl
  misc_feature (19)..(19): 2'-deoxy-2'-fluoro
  misc_feature (20)..(21): n stands for thymidine
ccuugcaacgcgagucugunn

SEQ ID NO: 4086 - RNA, 21 nt, Artificial Sequence
  Description of Artificial Sequence:  siNA antisense region
  misc_feature (4)..(4): 2'-O-methyl
  misc_feature (5)..(8): 2'-deoxy-2'-fluoro
  misc_feature (9)..(9): 2'-O-methyl
  misc_feature (10)..(10): 2'-deoxy-2'-fluoro
  misc_feature (11)..(12): 2'-O-methyl
  misc_feature (13)..(13): 2'-deoxy-2'-fluoro
  misc_feature (14)..(14): 2'-O-methyl
  misc_feature (15)..(15): 2'-deoxy-2'-fluoro
  misc_feature (16)..(18): 2'-O-methyl
  misc_feature (19)..(19): 2'-deoxy-2'-fluoro
  misc_feature (20)..(21): n stands for thymidine
cucgccuugcaacgcgagunn

SEQ ID NO: 4087 - RNA, 21 nt, Artificial Sequence
  Description of Artificial Sequence:  siNA antisense region
  misc_feature (4)..(4): 2'-deoxy-2'-fluoro
  misc_feature (5)..(5): 2'-O-methyl
  misc_feature (6)..(9): 2'-deoxy-2'-fluoro
  misc_feature (10)..(10): 2'-O-methyl
  misc_feature (11)..(14): 2'-deoxy-2'-fluoro
  misc_feature (15)..(15): 2'-O-methyl
  misc_feature (16)..(16): 2'-deoxy-2'-fluoro
  misc_feature (17)..(18): 2'-O-methyl
  misc_feature (19)..(19): 2'-deoxy-2'-fluoro
  misc_feature (20)..(21): n stands for thymidine
agcugccucgccuugcaacnn

SEQ ID NO: 4088 - RNA, 21 nt, Artificial Sequence
  Description of Artificial Sequence:  siNA antisense region
  misc_feature (4)..(6): 2'-O-methyl
  misc_feature (7)..(8): 2'-deoxy-2'-fluoro
  misc_feature (9)..(9): 2'-O-methyl
  misc_feature (10)..(13): 2'-deoxy-2'-fluoro
  misc_feature (14)..(14): 2'-O-methyl
  misc_feature (15)..(18): 2'-deoxy-2'-fluoro
  misc_feature (19)..(19): 2'-O-methyl
  misc_feature (20)..(21): n stands for thymidine
cucaagcugccucgccuugnn

SEQ ID NO: 4089 - RNA, 21 nt, Artificial Sequence
  Description of Artificial Sequence:  siNA antisense region
  misc_feature (4)..(5): 2'-deoxy-2'-fluoro
  misc_feature (6)..(8): 2'-O-methyl
  misc_feature (9)..(10): 2'-deoxy-2'-fluoro
  misc_feature (11)..(11): 2'-O-methyl
  misc_feature (12)..(15): 2'-deoxy-2'-fluoro
  misc_feature (16)..(16): 2'-O-methyl
  misc_feature (17)..(19): 2'-deoxy-2'-fluoro
  misc_feature (20)..(21): n stands for thymidine
aacucaagcugccucgccunn

SEQ ID NO: 4090 - RNA, 21 nt, Artificial Sequence
  Description of Artificial Sequence:  siNA antisense region
  misc_feature (4)..(5): 2'-deoxy-2'-fluoro
  misc_feature (6)..(7): 2'-O-methyl
  misc_feature (8)..(10): 2'-deoxy-2'-fluoro
  misc_feature (11)..(13): 2'-O-methyl
  misc_feature (14)..(15): 2'-deoxy-2'-fluoro
  misc_feature (16)..(16): 2'-O-methyl
  misc_feature (17)..(19): 2'-deoxy-2'-fluoro
  misc_feature (20)..(21): n stands for thymidine
cguuuaacucaagcugccunn

SEQ ID NO: 4091 - RNA, 21 nt, Artificial Sequence
  Description of Artificial Sequence:  siNA antisense region
  misc_feature (4)..(6): 2'-deoxy-2'-fluoro
  misc_feature (7)..(8): 2'-O-methyl
  misc_feature (9)..(11): 2'-deoxy-2'-fluoro
  misc_feature (12)..(14): 2'-O-methyl
  misc_feature (15)..(16): 2'-deoxy-2'-fluoro
  misc_feature (17)..(17): 2'-O-methyl
  misc_feature (18)..(19): 2'-deoxy-2'-fluoro
  misc_feature (20)..(21): n stands for thymidine
ucguuuaacucaagcugccnn

SEQ ID NO: 4092 - RNA, 21 nt, Artificial Sequence
  Description of Artificial Sequence:  siNA antisense region
  misc_feature (4)..(4): 2'-O-methyl
  misc_feature (5)..(7): 2'-deoxy-2'-fluoro
  misc_feature (8)..(9): 2'-O-methyl
  misc_feature (10)..(12): 2'-deoxy-2'-fluoro
  misc_feature (13)..(15): 2'-O-methyl
  misc_feature (16)..(17): 2'-deoxy-2'-fluoro
  misc_feature (18)..(18): 2'-O-methyl
  misc_feature (19)..(19): 2'-deoxy-2'-fluoro
  misc_feature (20)..(21): n stands for thymidine
uucguuuaacucaagcugcnn

SEQ ID NO: 4093 - RNA, 21 nt, Artificial Sequence
  Description of Artificial Sequence:  siNA antisense region
  misc_feature (4)..(4): 2'-deoxy-2'-fluoro
  misc_feature (5)..(5): 2'-O-methyl
  misc_feature (6)..(8): 2'-deoxy-2'-fluoro
  misc_feature (9)..(10): 2'-O-methyl
  misc_feature (11)..(13): 2'-deoxy-2'-fluoro
  misc_feature (14)..(16): 2'-O-methyl
  misc_feature (17)..(18): 2'-deoxy-2'-fluoro
  misc_feature (19)..(19): 2'-O-methyl
  misc_feature (20)..(21): n stands for thymidine
guucguuuaacucaagcugnn

SEQ ID NO: 4094 - RNA, 21 nt, Artificial Sequence
  Description of Artificial Sequence:  siNA antisense region
  misc_feature (4)..(5): 2'-deoxy-2'-fluoro
  misc_feature (6)..(6): 2'-O-methyl
  misc_feature (7)..(9): 2'-deoxy-2'-fluoro
  misc_feature (10)..(11): 2'-O-methyl
  misc_feature (12)..(14): 2'-deoxy-2'-fluoro
  misc_feature (15)..(17): 2'-O-methyl
  misc_feature (18)..(19): 2'-deoxy-2'-fluoro
  misc_feature (20)..(21): n stands for thymidine
cguucguuuaacucaagcunn

SEQ ID NO: 4095 - RNA, 21 nt, Artificial Sequence
  Description of Artificial Sequence:  siNA antisense region
  misc_feature (4)..(4): 2'-O-methyl
  misc_feature (5)..(5): 2'-deoxy-2'-fluoro
  misc_feature (6)..(6): 2'-O-methyl
  misc_feature (7)..(7): 2'-deoxy-2'-fluoro
  misc_feature (8)..(8): 2'-O-methyl
  misc_feature (9)..(11): 2'-deoxy-2'-fluoro
  misc_feature (12)..(12): 2'-O-methyl
  misc_feature (13)..(15): 2'-deoxy-2'-fluoro
  misc_feature (16)..(17): 2'-O-methyl
  misc_feature (18)..(19): 2'-deoxy-2'-fluoro
  misc_feature (20)..(21): n stands for thymidine
caaguacguucguuuaacunn

SEQ ID NO: 4096 - RNA, 21 nt, Artificial Sequence
  Description of Artificial Sequence:  siNA antisense region
  misc_feature (4)..(6): 2'-O-methyl
  misc_feature (7)..(7): 2'-deoxy-2'-fluoro
  misc_feature (8)..(8): 2'-O-methyl
  misc_feature (9)..(9): 2'-deoxy-2'-fluoro
  misc_feature (10)..(10): 2'-O-methyl
  misc_feature (11)..(13): 2'-deoxy-2'-fluoro
  misc_feature (14)..(14): 2'-O-methyl
  misc_feature (15)..(17): 2'-deoxy-2'-fluoro
  misc_feature (18)..(19): 2'-O-methyl
  misc_feature (20)..(21): n stands for thymidine
ugcaaguacguucguuuaann

SEQ ID NO: 4097 - RNA, 21 nt, Artificial Sequence
  Description of Artificial Sequence:  siNA antisense region
  misc_feature (4)..(4): 2'-deoxy-2'-fluoro
  misc_feature (5)..(7): 2'-O-methyl
  misc_feature (8)..(8): 2'-deoxy-2'-fluoro
  misc_feature (9)..(9): 2'-O-methyl
  misc_feature (10)..(10): 2'-deoxy-2'-fluoro
  misc_feature (11)..(11): 2'-O-methyl
  misc_feature (12)..(14): 2'-deoxy-2'-fluoro
  misc_feature (15)..(15): 2'-O-methyl
  misc_feature (16)..(18): 2'-deoxy-2'-fluoro
  misc_feature (19)..(19): 2'-O-methyl
  misc_feature (20)..(21): n stands for thymidine
cugcaaguacguucguuuann

SEQ ID NO: 4098 - RNA, 21 nt, Artificial Sequence
  Description of Artificial Sequence:  siNA antisense region
  misc_feature (4)..(4): 2'-O-methyl
  misc_feature (5)..(5): 2'-deoxy-2'-fluoro
  misc_feature (6)..(8): 2'-O-methyl
  misc_feature (9)..(9): 2'-deoxy-2'-fluoro
  misc_feature (10)..(10): 2'-O-methyl
  misc_feature (11)..(11): 2'-deoxy-2'-fluoro
  misc_feature (12)..(12): 2'-O-methyl
  misc_feature (13)..(15): 2'-deoxy-2'-fluoro
  misc_feature (16)..(16): 2'-O-methyl
  misc_feature (17)..(19): 2'-deoxy-2'-fluoro
  misc_feature (20)..(21): n stands for thymidine
ucugcaaguacguucguuunn

SEQ ID NO: 4099 - RNA, 21 nt, Artificial Sequence
  Description of Artificial Sequence:  siNA antisense region
  misc_feature (4)..(4): 2'-deoxy-2'-fluoro
  misc_feature (5)..(5): 2'-O-methyl
  misc_feature (6)..(6): 2'-deoxy-2'-fluoro
  misc_feature (7)..(9): 2'-O-methyl
  misc_feature (10)..(10): 2'-deoxy-2'-fluoro
  misc_feature (11)..(11): 2'-O-methyl
  misc_feature (12)..(12): 2'-deoxy-2'-fluoro
  misc_feature (13)..(13): 2'-O-methyl
  misc_feature (14)..(16): 2'-deoxy-2'-fluoro
  misc_feature (17)..(17): 2'-O-methyl
  misc_feature (18)..(19): 2'-deoxy-2'-fluoro
  misc_feature (20)..(21): n stands for thymidine
aucugcaaguacguucguunn

SEQ ID NO: 4100 - RNA, 21 nt, Artificial Sequence
  Description of Artificial Sequence:  siNA antisense region
  misc_feature (4)..(5): 2'-deoxy-2'-fluoro
  misc_feature (6)..(6): 2'-O-methyl
  misc_feature (7)..(7): 2'-deoxy-2'-fluoro
  misc_feature (8)..(8): 2'-O-methyl
  misc_feature (9)..(11): 2'-deoxy-2'-fluoro
  misc_feature (12)..(12): 2'-O-methyl
  misc_feature (13)..(13): 2'-deoxy-2'-fluoro
  misc_feature (14)..(16): 2'-O-methyl
  misc_feature (17)..(17): 2'-deoxy-2'-fluoro
  misc_feature (18)..(18): 2'-O-methyl
  misc_feature (19)..(19): 2'-deoxy-2'-fluoro
  misc_feature (20)..(21): n stands for thymidine
uugucacaucugcaaguacnn

SEQ ID NO: 4101 - RNA, 21 nt, Artificial Sequence
  Description of Artificial Sequence:  siNA antisense region
  misc_feature (4)..(4): 2'-O-methyl
  misc_feature (5)..(6): 2'-deoxy-2'-fluoro
  misc_feature (7)..(7): 2'-O-methyl
  misc_feature (8)..(8): 2'-deoxy-2'-fluoro
  misc_feature (9)..(9): 2'-O-methyl
  misc_feature (10)..(12): 2'-deoxy-2'-fluoro
  misc_feature (13)..(13): 2'-O-methyl
  misc_feature (14)..(14): 2'-deoxy-2'-fluoro
  misc_feature (15)..(17): 2'-O-methyl
  misc_feature (18)..(18): 2'-deoxy-2'-fluoro
  misc_feature (19)..(19): 2'-O-methyl
  misc_feature (20)..(21): n stands for thymidine
cuugucacaucugcaaguann

SEQ ID NO: 4102 - RNA, 21 nt, Artificial Sequence
  Description of Artificial Sequence:  siNA antisense region
  misc_feature (4)..(4): 2'-deoxy-2'-fluoro
  misc_feature (5)..(5): 2'-O-methyl
  misc_feature (6)..(7): 2'-deoxy-2'-fluoro
  misc_feature (8)..(8): 2'-O-methyl
  misc_feature (9)..(9): 2'-deoxy-2'-fluoro
  misc_feature (10)..(10): 2'-O-methyl
  misc_feature (11)..(13): 2'-deoxy-2'-fluoro
  misc_feature (14)..(14): 2'-O-methyl
  misc_feature (15)..(15): 2'-deoxy-2'-fluoro
  misc_feature (16)..(18): 2'-O-methyl
  misc_feature (19)..(19): 2'-deoxy-2'-fluoro
  misc_feature (20)..(21): n stands for thymidine
gcuugucacaucugcaagunn

SEQ ID NO: 4103 - RNA, 21 nt, Artificial Sequence
  Description of Artificial Sequence:  siNA sense region
  misc_feature (1)..(2): 2'-deoxy
  misc_feature (3)..(3): 2'-deoxy-2'-fluoro
  misc_feature (4)..(4): 2'-deoxy
  misc_feature (5)..(7): 2'-deoxy-2'-fluoro
  misc_feature (8)..(8): 2'-deoxy
  misc_feature (9)..(11): 2'-deoxy-2'-fluoro
  misc_feature (12)..(12): 2'-deoxy
  misc_feature (13)..(13): 2'-deoxy-2'-fluoro
  misc_feature (14)..(14): 2'-deoxy
  misc_feature (15)..(15): 2'-deoxy-2'-fluoro
  misc_feature (16)..(19): 2'-deoxy
  misc_feature (20)..(21): n stands for thymidine
agcauuuguuuguacaagann

SEQ ID NO: 4104 - RNA, 21 nt, Artificial Sequence
  Description of Artificial Sequence:  siNA antisense region
  misc_feature (4)..(4): 2'-deoxy-2'-fluoro
  misc_feature (5)..(5): 2'-O-methyl
  misc_feature (6)..(6): 2'-deoxy-2'-fluoro
  misc_feature (7)..(7): 2'-O-methyl
  misc_feature (8)..(8): 2'-deoxy-2'-fluoro
  misc_feature (9)..(11): 2'-O-methyl
  misc_feature (12)..(12): 2'-deoxy-2'-fluoro
  misc_feature (13)..(15): 2'-O-methyl
  misc_feature (16)..(16): 2'-deoxy-2'-fluoro
  misc_feature (17)..(17): 2'-O-methyl
  misc_feature (18)..(19): 2'-deoxy-2'-fluoro
  misc_feature (20)..(21): n stands for thymidine
ucuuguacaaacaaaugcunn

SEQ ID NO: 4105 - RNA, 21 nt, Artificial Sequence
  Description of Artificial Sequence:  siNA antisense region
  misc_feature (4)..(8): 2'-deoxy-2'-fluoro
  misc_feature (9)..(14): 2'-O-methyl
  misc_feature (15)..(15): 2'-deoxy-2'-fluoro
  misc_feature (16)..(16): 2'-O-methyl
  misc_feature (17)..(19): 2'-deoxy-2'-fluoro
  misc_feature (20)..(21): n stands for thymidine
guacuccuggaagauguccnn

SEQ ID NO: 4106 - RNA, 26 nt, Artificial Sequence
  Description of Artificial Sequence:  multifunctional siNA
  misc_feature (25)..(26): n stands for thymidine
caauuagaguggcagugagcaaagnn

SEQ ID NO: 4107 - RNA, 27 nt, Artificial Sequence
  Description of Artificial Sequence:  multifunctional siNA
  misc_feature (26)..(27): n stands for thymidine
acaauuagaguggcagugagcaaagnn

SEQ ID NO: 4108 - RNA, 28 nt, Artificial Sequence
  Description of Artificial Sequence:  multifunctional siNA
  misc_feature (27)..(28): n stands for thymidine
gacaauuagaguggcagugagcaaagnn

SEQ ID NO: 4109 - RNA, 35 nt, Artificial Sequence
  Description of Artificial Sequence:  multifunctional siNA
  misc_feature (34)..(35): n stands for thymidine
ugugccagcaguccagcauuuguuuguacaagann

SEQ ID NO: 4110 - RNA, 28 nt, Artificial Sequence
  Description of Artificial Sequence:  multifunctional siNA
  misc_feature (27)..(28): n stands for thymidine
uugguauagagacggggucagagagann

SEQ ID NO: 4111 - RNA, 26 nt, Artificial Sequence
  Description of Artificial Sequence:  multifunctional siNA
  misc_feature (25)..(26): n stands for thymidine
cuuugcucacugccacucuaauugnn

SEQ ID NO: 4112 - RNA, 27 nt, Artificial Sequence
  Description of Artificial Sequence:  multifunctional siNA
  misc_feature (26)..(27): n stands for thymidine
cuuugcucacugccacucuaauugunn

SEQ ID NO: 4113 - RNA, 28 nt, Artificial Sequence
  Description of Artificial Sequence:  multifunctional siNA
  misc_feature (27)..(28): n stands for thymidine
cuuugcucacugccacucuaauugucnn

SEQ ID NO: 4114 - RNA, 35 nt, Artificial Sequence
  Description of Artificial Sequence:  multifunctional siNA
  misc_feature (34)..(35): n stands for thymidine
ucuuguacaaacaaaugcuggacugcuggcacann

SEQ ID NO: 4115 - RNA, 28 nt, Artificial Sequence
  Description of Artificial Sequence:  multifunctional siNA
  misc_feature (27)..(28): n stands for thymidine
ucucucugaccccgucucuauaccaann

SEQ ID NO: 4116 - RNA, 40 nt, Artificial Sequence
  Description of Artificial Sequence:  multifunctional siNA
  misc_feature (39)..(40): n stands for thymidine
ugugccagcaguccagcauugugaaugcagaccaaagann

SEQ ID NO: 4117 - RNA, 40 nt, Artificial Sequence
  Description of Artificial Sequence:  multifunctional siNA
  misc_feature (39)..(40): n stands for thymidine
ucuuuggucugcauucacaaugcuggacugcuggcacann

SEQ ID NO: 4118 - RNA, 36 nt, Artificial Sequence
  Description of Artificial Sequence:  multifunctional siNA
  misc_feature (35)..(36): n stands for thymidine
ugugccagcaguccagcugaaugcagaccaaagann

SEQ ID NO: 4119 - RNA, 36 nt, Artificial Sequence
  Description of Artificial Sequence:  multifunctional siNA
  misc_feature (35)..(36): n stands for thymidine
ucuuuggucugcauucagcuggacugcuggcacann

SEQ ID NO: 4120 - RNA, 40 nt, Artificial Sequence
  Description of Artificial Sequence:  multifunctional siNA
  misc_feature (39)..(40): n stands for thymidine
ugugccagcaguccagcaugaaugcagaccaaagaaagnn

SEQ ID NO: 4121 - RNA, 40 nt, Artificial Sequence
  Description of Artificial Sequence:  multifunctional siNA
  misc_feature (39)..(40): n stands for thymidine
cuuucuuuggucugcauucaugcuggacugcuggcacann

SEQ ID NO: 4122 - RNA, 40 nt, Artificial Sequence
  Description of Artificial Sequence:  multifunctional siNA
  misc_feature (39)..(40): n stands for thymidine
ugugccagcaguccagcaugugaaugcagaccaaagaann

SEQ ID NO: 4123 - RNA, 40 nt, Artificial Sequence
  Description of Artificial Sequence:  multifunctional siNA
  misc_feature (39)..(40): n stands for thymidine
uucuuuggucugcauucacaugcuggacugcuggcacann

SEQ ID NO: 4124 - RNA, 42 nt, Artificial Sequence
  Description of Artificial Sequence:  multifunctional siNA
  misc_feature (20)..(21): n stands for thymidine
  misc_feature (23)..(23): hexethelyne glycol spacer
  misc_feature (41)..(42): n stands for thymidine
ggacaucuuccaggaguacnngaacugaguuuaaaaggcann

SEQ ID NO: 4125 - RNA, 42 nt, Artificial Sequence
  Description of Artificial Sequence:  multifunctional siNA
  misc_feature (20)..(21): n stands for thymidine
  misc_feature (23)..(23): hexethelyne glycol spacer
  misc_feature (41)..(42): n stands for thymidine
gugaaugcagaccaaagaanngaacugaguuuaaaaggcann

SEQ ID NO: 4126 - RNA, 42 nt, Artificial Sequence
  Description of Artificial Sequence:  multifunctional siNA
  misc_feature (20)..(21): n stands for thymidine
  misc_feature (23)..(23): hexethelyne glycol spacer
  misc_feature (41)..(42): n stands for thymidine
ugagcauggaagaggauucnngaacugaguuuaaaaggcann

SEQ ID NO: 4127 - RNA, 42 nt, Artificial Sequence
  Description of Artificial Sequence:  multifunctional siNA
  misc_feature (20)..(21): n stands for thymidine
  misc_feature (23)..(23): hexethelyne glycol spacer
  misc_feature (41)..(42): n stands for thymidine
gaacugaguuuaaaaggcanngugaaugcagaccaaagaann

SEQ ID NO: 4128 - RNA, 42 nt, Artificial Sequence
  Description of Artificial Sequence:  multifunctional siNA
  misc_feature (20)..(21): n stands for thymidine
  misc_feature (23)..(23): hexethelyne glycol spacer
  misc_feature (41)..(42): n stands for thymidine
augcuggacugcuggcacanngugaaugcagaccaaagaann

SEQ ID NO: 4129 - RNA, 42 nt, Artificial Sequence; identical to SEQ ID NO: 4128
  Description of Artificial Sequence:  multifunctional siNA
  misc_feature (20)..(21): n stands for thymidine
  misc_feature (23)..(23): C12 spacer
  misc_feature (41)..(42): n stands for thymidine

SEQ ID NO: 4130 - RNA, 43 nt, Artificial Sequence
  Description of Artificial Sequence:  multifunctional siNA
  misc_feature (20)..(21): n stands for thymidine
  misc_feature (23)..(23): tetraethelyne glycol spacer
  misc_feature (42)..(43): n stands for thymidine
augcuggacugcuggcacannygugaaugcagaccaaagaann

SEQ ID NO: 4131 - RNA, 43 nt, Artificial Sequence
  Description of Artificial Sequence:  multifunctional siNA
  misc_feature (20)..(22): n stands for thymidine
  misc_feature (23)..(23): C3 spacer
  misc_feature (42)..(43): n stands for thymidine
augcuggacugcuggcacannngugaaugcagaccaaagaann

SEQ ID NO: 4132 - RNA, 42 nt, Artificial Sequence; identical to SEQ ID NO: 4128
  Description of Artificial Sequence:  multifunctional siNA
  misc_feature (20)..(21): n stands for thymidine
  misc_feature (23)..(24): hexethelyne glycol spacer
  misc_feature (41)..(42): n stands for thymidine

SEQ ID NO: 4133 - RNA, 31 nt, Artificial Sequence
  Description of Artificial Sequence:  multifunctional siNA
  misc_feature (30)..(31): n stands for thymidine
uuuaagaaaaaagaagaggaagcuccugann

SEQ ID NO: 4134 - RNA, 32 nt, Artificial Sequence
  Description of Artificial Sequence:  multifunctional siNA
  misc_feature (31)..(32): n stands for thymidine
uguuuaagaaaaaagaagaaggaaacagaann

SEQ ID NO: 4135 - RNA, 31 nt, Artificial Sequence
  Description of Artificial Sequence:  multifunctional siNA
  misc_feature (30)..(31): n stands for thymidine
uaaauuaaaacgagaaacauucuuuuaucnn

SEQ ID NO: 4136 - RNA, 31 nt, Artificial Sequence
  Description of Artificial Sequence:  multifunctional siNA
  misc_feature (30)..(31): n stands for thymidine
ucggcccgauucaagugggccuuggaucgnn

SEQ ID NO: 4137 - RNA, 31 nt, Artificial Sequence
  Description of Artificial Sequence:  multifunctional siNA
  misc_feature (30)..(31): n stands for thymidine
gucggcccgauucaaguggccagaggcaunn

SEQ ID NO: 4138 - RNA, 31 nt, Artificial Sequence
  Description of Artificial Sequence:  multifunctional siNA
  misc_feature (30)..(31): n stands for thymidine
uuccucgacuucucucugguuguguaugunn

SEQ ID NO: 4139 - RNA, 29 nt, Artificial Sequence
  Description of Artificial Sequence:  multifunctional siNA
  misc_feature (28)..(29): n stands for thymidine
ucucucugaccccgucucuauaccaacnn

SEQ ID NO: 4140 - RNA, 31 nt, Artificial Sequence
  Description of Artificial Sequence:  multifunctional siNA
  misc_feature (30)..(31): n stands for thymidine
ucagcgcgacuggucagcuacugggacacnn

SEQ ID NO: 4141 - RNA, 31 nt, Artificial Sequence
  Description of Artificial Sequence:  multifunctional siNA
  misc_feature (30)..(31): n stands for thymidine
aaguuggacgaaaaguuuccacuugacacnn

SEQ ID NO: 4142 - RNA, 33 nt, Artificial Sequence
  Description of Artificial Sequence:  multifunctional siNA
  misc_feature (32)..(33): n stands for thymidine
ucuccggcucgggcugugggaaaucuucuccnn

SEQ ID NO: 4143 - RNA, 31 nt, Artificial Sequence
  Description of Artificial Sequence:  multifunctional siNA
  misc_feature (30)..(31): n stands for thymidine
agacagcagaaaguucaugagccuggaaann

SEQ ID NO: 4144 - RNA, 33 nt, Artificial Sequence
  Description of Artificial Sequence:  multifunctional siNA
  misc_feature (32)..(33): n stands for thymidine
cugggaccacuuggcauggaguucuuggcaunn

SEQ ID NO: 4145 - RNA, 33 nt, Artificial Sequence
  Description of Artificial Sequence:  multifunctional siNA
  misc_feature (32)..(33): n stands for thymidine
acacaggauggcuugaagaugggaaggauuunn

SEQ ID NO: 4146 - RNA, 29 nt, Artificial Sequence
  Description of Artificial Sequence:  multifunctional siNA
  misc_feature (28)..(29): n stands for thymidine
guuugauccgcauaaucugggacaguann

SEQ ID NO: 4147 - RNA, 30 nt, Artificial Sequence
  Description of Artificial Sequence:  multifunctional siNA
  misc_feature (29)..(30): n stands for thymidine
gguuugauccgcauaaucugggacaguann

SEQ ID NO: 4148 - RNA, 31 nt, Artificial Sequence
  Description of Artificial Sequence:  multifunctional siNA
  misc_feature (30)..(31): n stands for thymidine
uaggaagcucaucucuccuguggauuccunn

SEQ ID NO: 4149 - RNA, 34 nt, Artificial Sequence
  Description of Artificial Sequence:  multifunctional siNA
  misc_feature (33)..(34): n stands for thymidine
uuuguugugcuguaggaagcucugaugaugucnn

SEQ ID NO: 4150 - RNA, 31 nt, Artificial Sequence
  Description of Artificial Sequence:  multifunctional siNA
  misc_feature (30)..(31): n stands for thymidine
auucacauuuguugugcuguuucugacucnn

SEQ ID NO: 4151 - RNA, 30 nt, Artificial Sequence
  Description of Artificial Sequence:  multifunctional siNA
  misc_feature (29)..(30): n stands for thymidine
uuggucugcauucacauuuuguaucagunn

SEQ ID NO: 4152 - RNA, 31 nt, Artificial Sequence
  Description of Artificial Sequence:  multifunctional siNA
  misc_feature (30)..(31): n stands for thymidine
ucaggagcuuccucuucuuuuuucuuaaann

SEQ ID NO: 4153 - RNA, 32 nt, Artificial Sequence
  Description of Artificial Sequence:  multifunctional siNA
  misc_feature (31)..(32): n stands for thymidine
uucuguuuccuucuucuuuuuucuuaaacann

SEQ ID NO: 4154 - RNA, 31 nt, Artificial Sequence
  Description of Artificial Sequence:  multifunctional siNA
  misc_feature (30)..(31): n stands for thymidine
gauaaaagaauguuucucguuuuaauuuann

SEQ ID NO: 4155 - RNA, 31 nt, Artificial Sequence
  Description of Artificial Sequence:  multifunctional siNA
  misc_feature (30)..(31): n stands for thymidine
cgauccaaggcccacuugaaucgggccgann

SEQ ID NO: 4156 - RNA, 31 nt, Artificial Sequence
  Description of Artificial Sequence:  multifunctional siNA
  misc_feature (30)..(31): n stands for thymidine
augccucuggccacuugaaucgggccgacnn

SEQ ID NO: 4157 - RNA, 31 nt, Artificial Sequence
  Description of Artificial Sequence:  multifunctional siNA
  misc_feature (30)..(31): n stands for thymidine
acauacacaaccagagagaagucgaggaann

SEQ ID NO: 4158 - RNA, 29 nt, Artificial Sequence
  Description of Artificial Sequence:  multifunctional siNA
  misc_feature (28)..(29): n stands for thymidine
guugguauagagacggggucagagagann

SEQ ID NO: 4159 - RNA, 31 nt, Artificial Sequence
  Description of Artificial Sequence:  multifunctional siNA
  misc_feature (30)..(31): n stands for thymidine
gugucccaguagcugaccagucgcgcugann

SEQ ID NO: 4160 - RNA, 31 nt, Artificial Sequence
  Description of Artificial Sequence:  multifunctional siNA
  misc_feature (30)..(31): n stands for thymidine
gugucaaguggaaacuuuucguccaacuunn

SEQ ID NO: 4161 - RNA, 33 nt, Artificial Sequence
  Description of Artificial Sequence:  multifunctional siNA
  misc_feature (32)..(33): n stands for thymidine
ggagaagauuucccacagcccgagccggagann

SEQ ID NO: 4162 - RNA, 31 nt, Artificial Sequence
  Description of Artificial Sequence:  multifunctional siNA
  misc_feature (30)..(31): n stands for thymidine
uuuccaggcucaugaacuuucugcugucunn

SEQ ID NO: 4163 - RNA, 33 nt, Artificial Sequence
  Description of Artificial Sequence:  multifunctional siNA
  misc_feature (32)..(33): n stands for thymidine
augccaagaacuccaugccaaguggucccagnn

SEQ ID NO: 4164 - RNA, 33 nt, Artificial Sequence
  Description of Artificial Sequence:  multifunctional siNA
  misc_feature (32)..(33): n stands for thymidine
aaauccuucccaucuucaagccauccugugunn

SEQ ID NO: 4165 - RNA, 29 nt, Artificial Sequence
  Description of Artificial Sequence:  multifunctional siNA
  misc_feature (28)..(29): n stands for thymidine
uacugucccagauuaugcggaucaaacnn

SEQ ID NO: 4166 - RNA, 30 nt, Artificial Sequence
  Description of Artificial Sequence:  multifunctional siNA
  misc_feature (29)..(30): n stands for thymidine
uacugucccagauuaugcggaucaaaccnn

SEQ ID NO: 4167 - RNA, 31 nt, Artificial Sequence
  Description of Artificial Sequence:  multifunctional siNA
  misc_feature (30)..(31): n stands for thymidine
aggaauccacaggagagaugagcuuccuann

SEQ ID NO: 4168 - RNA, 34 nt, Artificial Sequence
  Description of Artificial Sequence:  multifunctional siNA
  misc_feature (33)..(34): n stands for thymidine
gacaucaucagagcuuccuacagcacaacaaann

SEQ ID NO: 4169 - RNA, 31 nt, Artificial Sequence
  Description of Artificial Sequence:  multifunctional siNA
  misc_feature (30)..(31): n stands for thymidine
gagucagaaacagcacaacaaaugugaaunn

SEQ ID NO: 4170 - RNA, 30 nt, Artificial Sequence
  Description of Artificial Sequence:  multifunctional siNA
  misc_feature (29)..(30): n stands for thymidine
acugauacaaaaugugaaugcagaccaann

SEQ ID NO: 4171 - RNA, 40 nt, Artificial Sequence
  Description of Artificial Sequence:  multifunctional siNA
  misc_feature (4)..(4): 2'-O-methyl
  misc_feature (5)..(6): 2'-deoxy-2'-fluoro
  misc_feature (7)..(8): 2'-O-methyl
  misc_feature (9)..(9): 2'-deoxy-2'-fluoro
  misc_feature (10)..(11): 2'-O-methyl
  misc_feature (12)..(14): 2'-deoxy-2'-fluoro
  misc_feature (15)..(16): 2'-O-methyl
  misc_feature (17)..(17): 2'-deoxy-2'-fluoro
  misc_feature (18)..(18): 2'-O-methyl
  misc_feature (19)..(19): 2'-deoxy-2'-fluoro
  misc_feature (20)..(21): 2'-deoxy
  misc_feature (22)..(22): 2'-deoxy-2'-fluoro
  misc_feature (23)..(23): 2'-deoxy
  misc_feature (24)..(26): 2'-deoxy-2'-fluoro
  misc_feature (27)..(27): 2'-deoxy
  misc_feature (29)..(30): 2'-deoxy-2'-fluoro
  misc_feature (31)..(31): 2'-deoxy
  misc_feature (32)..(32): 2'-deoxy-2'-fluoro
  misc_feature (33)..(33): 2'-deoxy
  misc_feature (34)..(34): 2'-deoxy-2'-fluoro
  misc_feature (35)..(38): 2'-deoxy
  misc_feature (39)..(39): n stands for thymidine
  misc_feature (40)..(40): 3'-3 attached terminal deoxyabasic moeity
ugugccagcaguccagcauagcauuuguuuguacaagann

SEQ ID NO: 4172 - RNA, 40 nt, Artificial Sequence
  Description of Artificial Sequence:  multifunctional siNA
  misc_feature (4)..(4): 2'-deoxy-2'-fluoro
  misc_feature (5)..(5): 2'-O-methyl
  misc_feature (6)..(6): 2'-deoxy-2'-fluoro
  misc_feature (7)..(7): 2'-O-methyl
  misc_feature (8)..(8): 2'-deoxy-2'-fluoro
  misc_feature (9)..(11): 2'-O-methyl
  misc_feature (12)..(12): 2'-deoxy-2'-fluoro
  misc_feature (13)..(15): 2'-O-methyl
  misc_feature (16)..(16): 2'-deoxy-2'-fluoro
  misc_feature (17)..(17): 2'-O-methyl
  misc_feature (18)..(19): 2'-deoxy-2'-fluoro
  misc_feature (20)..(20): 2'-deoxy
  misc_feature (21)..(21): 2'-deoxy-2'-fluoro
  misc_feature (22)..(22): 2'-deoxy
  misc_feature (23)..(24): 2'-deoxy-2'-fluoro
  misc_feature (25)..(27): 2'-deoxy
  misc_feature (28)..(29): 2'-deoxy-2'-fluoro
  misc_feature (30)..(30): 2'-deoxy
  misc_feature (31)..(32): 2'-deoxy-2'-fluoro
  misc_feature (33)..(34): 2'-deoxy
  misc_feature (35)..(35): 2'-deoxy-2'-fluoro
  misc_feature (36)..(36): 2'-deoxy
  misc_feature (37)..(37): 2'-deoxy-2'-fluoro
  misc_feature (38)..(38): 2'-deoxy
  misc_feature (39)..(39): n stands for thymidine
  misc_feature (40)..(40): 3'-3 attached terminal deoxyabasic moeity
ucuuguacaaacaaaugcuaugcuggacugcuggcacann

SEQ ID NO: 4173 - RNA, 42 nt, Artificial Sequence; identical to SEQ ID NO: 4124
  Description of Artificial Sequence:  multifunctional siNA
  misc_feature (1)..(1): 5'-3 attached terminal deoxyabasic moeity
  misc_feature (4)..(4): 2'-deoxy-2'-fluoro
  misc_feature (6)..(11): 2'-deoxy-2'-fluoro
  misc_feature (17)..(17): 2'-deoxy-2'-fluoro
  misc_feature (19)..(19): 2'-deoxy-2'-fluoro
  misc_feature (20)..(20): n stands for thymidine
  misc_feature (21)..(21): hexethelyne glycol spacer
  misc_feature (22)..(24): 2'-deoxy
  misc_feature (25)..(26): 2'-deoxy-2'-fluoro
  misc_feature (27)..(29): 2'-deoxy
  misc_feature (30)..(32): 2'-deoxy-2'-fluoro
  misc_feature (33)..(38): 2'-deoxy
  misc_feature (39)..(39): 2'-deoxy-2'-fluoro
  misc_feature (40)..(40): 2'-deoxy
  misc_feature (41)..(41): n stands for thymidine
  misc_feature (42)..(42): 3'-3 attached terminal deoxyabasic moeity

SEQ ID NO: 4174 - RNA, 42 nt, Artificial Sequence; identical to SEQ ID NO: 4125
  Description of Artificial Sequence:  multifunctional siNA
  misc_feature (1)..(1): 5'-3 attached terminal deoxyabasic moeity
  misc_feature (1)..(1): 2'-deoxy
  misc_feature (2)..(2): 2'-deoxy-2'-fluoro
  misc_feature (3)..(5): 2'-deoxy
  misc_feature (6)..(6): 2'-deoxy-2'-fluoro
  misc_feature (7)..(7): 2'-deoxy
  misc_feature (8)..(8): 2'-deoxy-2'-fluoro
  misc_feature (9)..(11): 2'-deoxy
  misc_feature (12)..(13): 2'-deoxy-2'-fluoro
  misc_feature (14)..(19): 2'-deoxy
  misc_feature (20)..(20): n stands for thymidine
  misc_feature (21)..(21): hexethelyne glycol spacer
  misc_feature (22)..(24): 2'-deoxy
  misc_feature (25)..(26): 2'-deoxy-2'-fluoro
  misc_feature (27)..(29): 2'-deoxy
  misc_feature (30)..(32): 2'-deoxy-2'-fluoro
  misc_feature (33)..(38): 2'-deoxy
  misc_feature (39)..(39): 2'-deoxy-2'-fluoro
  misc_feature (40)..(40): 2'-deoxy
  misc_feature (41)..(41): n stands for thymidine
  misc_feature (42)..(42): 3'-3 attached terminal deoxyabasic moeity

SEQ ID NO: 4175 - RNA, 42 nt, Artificial Sequence; identical to SEQ ID NO: 4127
  Description of Artificial Sequence:  multifunctional siNA
  misc_feature (1)..(1): 5'-3 attached terminal deoxyabasic moeity
  misc_feature (1)..(3): 2'-deoxy
  misc_feature (4)..(5): 2'-deoxy-2'-fluoro
  misc_feature (6)..(8): 2'-deoxy
  misc_feature (9)..(11): 2'-deoxy-2'-fluoro
  misc_feature (12)..(17): 2'-deoxy
  misc_feature (18)..(18): 2'-deoxy-2'-fluoro
  misc_feature (19)..(19): 2'-deoxy
  misc_feature (20)..(20): n stands for thymidine
  misc_feature (21)..(21): hexethelyne glycol spacer
  misc_feature (22)..(22): 2'-deoxy
  misc_feature (23)..(23): 2'-deoxy-2'-fluoro
  misc_feature (24)..(26): 2'-deoxy
  misc_feature (27)..(27): 2'-deoxy-2'-fluoro
  misc_feature (28)..(28): 2'-deoxy
  misc_feature (29)..(29): 2'-deoxy-2'-fluoro
  misc_feature (30)..(32): 2'-deoxy
  misc_feature (33)..(34): 2'-deoxy-2'-fluoro
  misc_feature (35)..(40): 2'-deoxy
  misc_feature (41)..(41): n stands for thymidine
  misc_feature (42)..(42): 3'-3 attached terminal deoxyabasic moeity

SEQ ID NO: 4176 - RNA, 42 nt, Artificial Sequence; identical to SEQ ID NO: 4128
  Description of Artificial Sequence:  multifunctional siNA
  misc_feature (1)..(1): 5'-3 attached terminal deoxyabasic moeity
  misc_feature (1)..(1): 2'-deoxy
  misc_feature (2)..(2): 2'-deoxy-2'-fluoro
  misc_feature (3)..(3): 2'-deoxy
  misc_feature (4)..(5): 2'-deoxy-2'-fluoro
  misc_feature (6)..(8): 2'-deoxy
  misc_feature (9)..(10): 2'-deoxy-2'-fluoro
  misc_feature (11)..(11): 2'-deoxy
  misc_feature (12)..(13): 2'-deoxy-2'-fluoro
  misc_feature (14)..(15): 2'-deoxy
  misc_feature (16)..(16): 2'-deoxy-2'-fluoro
  misc_feature (17)..(17): 2'-deoxy
  misc_feature (18)..(18): 2'-deoxy-2'-fluoro
  misc_feature (19)..(19): 2'-deoxy
  misc_feature (20)..(20): n stands for thymidine
  misc_feature (21)..(21): hexethelyne glycol spacer
  misc_feature (22)..(22): 2'-deoxy
  misc_feature (23)..(23): 2'-deoxy-2'-fluoro
  misc_feature (24)..(26): 2'-deoxy
  misc_feature (27)..(27): 2'-deoxy-2'-fluoro
  misc_feature (28)..(28): 2'-deoxy
  misc_feature (29)..(29): 2'-deoxy-2'-fluoro
  misc_feature (30)..(32): 2'-deoxy
  misc_feature (33)..(34): 2'-deoxy-2'-fluoro
  misc_feature (35)..(40): 2'-deoxy
  misc_feature (41)..(41): n stands for thymidine
  misc_feature (42)..(42): 3'-3 attached terminal deoxyabasic moeity

SEQ ID NO: 4177 - RNA, 52 nt, Artificial Sequence
  Description of Artificial Sequence:  multifunctional siNA
  misc_feature (20)..(21): n stands for thymidine
  misc_feature (27)..(27): n stands for thymidine
  misc_feature (30)..(30): n stands for thymidine
  misc_feature (51)..(52): n stands for thymidine
augcuggacugcuggcacanngaucancgnagugaaugcagaccaaagaann

SEQ ID NO: 4178 - RNA, 48 nt, Artificial Sequence
  Description of Artificial Sequence:  multifunctional siNA
  misc_feature (20)..(21): n stands for thymidine
  misc_feature (27)..(27): n stands for thymidine
  misc_feature (47)..(48): n stands for thymidine
augcuggacugcuggcacanngaucangugaaugcagaccaaagaann

SEQ ID NO: 4179 - RNA, 45 nt, Artificial Sequence
  Description of Artificial Sequence:  multifunctional siNA
  misc_feature (20)..(21): n stands for thymidine
  misc_feature (44)..(45): n stands for thymidine
augcuggacugcuggcacanngaugugaaugcagaccaaagaann

SEQ ID NO: 4180 - RNA, 42 nt, Artificial Sequence; identical to SEQ ID NO: 4128
  Description of Artificial Sequence:  multifunctional siNA
  misc_feature (20)..(21): n stands for thymidine
  misc_feature (41)..(42): n stands for thymidine

SEQ ID NO: 4181 - RNA, 42 nt, Artificial Sequence
  Description of Artificial Sequence:  multifunctional siNA
  misc_feature (4)..(4): 2'-O-methyl
  misc_feature (5)..(6): 2'-deoxy-2'-fluoro
  misc_feature (7)..(8): 2'-O-methyl
  misc_feature (9)..(9): 2'-deoxy-2'-fluoro
  misc_feature (10)..(11): 2'-O-methyl
  misc_feature (12)..(14): 2'-deoxy-2'-fluoro
  misc_feature (15)..(16): 2'-O-methyl
  misc_feature (17)..(17): 2'-deoxy-2'-fluoro
  misc_feature (18)..(18): 2'-O-methyl
  misc_feature (19)..(19): 2'-deoxy-2'-fluoro
  misc_feature (20)..(21): n stands for thymidine
  misc_feature (22)..(22): 2'-deoxy
  misc_feature (23)..(23): 2'-deoxy-2'-fluoro
  misc_feature (24)..(26): 2'-deoxy
  misc_feature (27)..(27): 2'-deoxy-2'-fluoro
  misc_feature (28)..(28): 2'-deoxy
  misc_feature (29)..(29): 2'-deoxy-2'-fluoro
  misc_feature (30)..(32): 2'-deoxy
  misc_feature (33)..(34): 2'-deoxy-2'-fluoro
  misc_feature (35)..(40): 2'-deoxy
  misc_feature (41)..(41): n stands for thymidine
  misc_feature (42)..(42): 3'-3 attached terminal deoxyabasic moeity
ugugccagcaguccagcaunngugaaugcagaccaaagaann

SEQ ID NO: 4182 - RNA, 42 nt, Artificial Sequence
  Description of Artificial Sequence:  multifunctional siNA
  misc_feature (4)..(6): 2'-deoxy-2'-fluoro
  misc_feature (7)..(8): 2'-O-methyl
  misc_feature (9)..(11): 2'-deoxy-2'-fluoro
  misc_feature (12)..(12): 2'-O-methyl
  misc_feature (13)..(13): 2'-deoxy-2'-fluoro
  misc_feature (14)..(14): 2'-O-methyl
  misc_feature (15)..(17): 2'-deoxy-2'-fluoro
  misc_feature (18)..(18): 2'-O-methyl
  misc_feature (19)..(19): 2'-deoxy-2'-fluoro
  misc_feature (20)..(21): n stands for thymidine
  misc_feature (22)..(22): 2'-deoxy
  misc_feature (23)..(23): 2'-deoxy-2'-fluoro
  misc_feature (24)..(24): 2'-deoxy
  misc_feature (25)..(26): 2'-deoxy-2'-fluoro
  misc_feature (27)..(29): 2'-deoxy
  misc_feature (30)..(31): 2'-deoxy-2'-fluoro
  misc_feature (32)..(32): 2'-deoxy
  misc_feature (33)..(34): 2'-deoxy-2'-fluoro
  misc_feature (35)..(36): 2'-deoxy
  misc_feature (37)..(37): 2'-deoxy-2'-fluoro
  misc_feature (38)..(38): 2'-deoxy
  misc_feature (39)..(39): 2'-deoxy-2'-fluoro
  misc_feature (40)..(40): 2'-deoxy
  misc_feature (41)..(41): n stands for thymidine
  misc_feature (42)..(42): 3'-3 attached terminal deoxyabasic moeity
uucuuuggucugcauucacnnaugcuggacugcuggcacann

SEQ ID NO: 4183 - RNA, 42 nt, Artificial Sequence; identical to SEQ ID NO: 4127
  Description of Artificial Sequence:  multifunctional siNA
  misc_feature (1)..(1): 5'-3 attached terminal deoxyabasic moeity
  misc_feature (20)..(20): n stands for thymidine
  misc_feature (21)..(21): hexethelyne glycol spacer
  misc_feature (41)..(41): n stands for thymidine
  misc_feature (42)..(42): 3'-3 attached terminal deoxyabasic moeity

SEQ ID NO: 4184 - RNA, 38 nt, Artificial Sequence
  Description of Artificial Sequence:  multifunctional siNA
  misc_feature (1)..(1): 5'-3 attached terminal deoxyabasic moeity
  misc_feature (38)..(38): 3'-3 attached terminal deoxyabasic moeity
gaacugaguuuaaaaggcagugaaugcagaccaaagaa

SEQ ID NO: 4185 - RNA, 38 nt, Artificial Sequence
  Description of Artificial Sequence:  multifunctional siNA
uucuuuggucugcauucacugccuuuuaaacucaguuc

SEQ ID NO: 4186 - RNA, 40 nt, Artificial Sequence
  Description of Artificial Sequence:  multifunctional siNA
  misc_feature (39)..(39): n stands for thymidine
  misc_feature (40)..(40): 3'-3 attached terminal deoxyabasic moeity
ugccuuuuaaacucaguucgugaaugcagaccaaagaann

SEQ ID NO: 4187 - RNA, 40 nt, Artificial Sequence
  Description of Artificial Sequence:  multifunctional siNA
  misc_feature (39)..(39): n stands for thymidine
  misc_feature (40)..(40): 3'-3 attached terminal deoxyabasic moeity
uucuuuggucugcauucacgaacugaguuuaaaaggcann

SEQ ID NO: 4188 - RNA, 30 nt, Artificial Sequence
  Description of Artificial Sequence:  siNA antisense palindrome
  misc_feature (1)..(1): terminal phosphate
  misc_feature (30)..(30): 3'-3 attached terminal deoxyabasic moeity
gugcugggugccuuuuaaaaggcacccagc

SEQ ID NO: 4189 - RNA, 28 nt, Artificial Sequence
  Description of Artificial Sequence:  siNA antisense palindrome
  misc_feature (1)..(1): terminal phosphate
  misc_feature (28)..(28): 3'-3 attached terminal deoxyabasic moeity
gugcugggugccuuuaaaggcacccagc

SEQ ID NO: 4190 - RNA, 26 nt, Artificial Sequence
  Description of Artificial Sequence:  siNA antisense palindrome
  misc_feature (1)..(1): terminal phosphate
  misc_feature (26)..(26): 3'-3 attached terminal deoxyabasic moeity
gugcugggugccuuaaggcacccagc

SEQ ID NO: 4191 - RNA, 27 nt, Artificial Sequence
  Description of Artificial Sequence:  siNA antisense palindrome
  misc_feature (1)..(1): terminal phosphate
  misc_feature (27)..(27): 3'-3 attached terminal deoxyabasic moeity
aaugcuuuaucauauauaugauaaagc

SEQ ID NO: 4192 - RNA, 25 nt, Artificial Sequence
  Description of Artificial Sequence:  siNA antisense palindrome
  misc_feature (1)..(1): terminal phosphate
  misc_feature (25)..(25): 3'-3 attached terminal deoxyabasic moeity
aaugcuuuaucauauaugauaaagc

SEQ ID NO: 4193 - RNA, 23 nt, Artificial Sequence
  Description of Artificial Sequence:  siNA antisense palindrome
  misc_feature (1)..(1): terminal phosphate
  misc_feature (23)..(23): 3'-3 attached terminal deoxyabasic moeity
aaugcuuuaucauaugauaaagc

SEQ ID NO: 4194 - RNA, 24 nt, Artificial Sequence
  Description of Artificial Sequence:  siNA antisense palindrome
  misc_feature (1)..(1): terminal phosphate
  misc_feature (24)..(24): 3'-3 attached terminal deoxyabasic moeity
aaugcuuuaucauaugauaaagca

SEQ ID NO: 4195 - RNA, 28 nt, Artificial Sequence
  Description of Artificial Sequence:  siNA antisense palindrome
  misc_feature (1)..(1): terminal phosphate
  misc_feature (28)..(28): 3'-3 attached terminal deoxyabasic moeity
aaugcuuuaucauauaugauaaagcauu

SEQ ID NO: 4196 - RNA, 26 nt, Artificial Sequence
  Description of Artificial Sequence:  siNA antisense palindrome
  misc_feature (1)..(1): terminal phosphate
  misc_feature (26)..(26): 3'-3 attached terminal deoxyabasic moeity
aaugcuuuaucauaugauaaagcauu

SEQ ID NO: 4197 - RNA, 31 nt, Artificial Sequence
  Description of Artificial Sequence:  siNA antisense palindrome
  misc_feature (1)..(1): terminal phosphate
  misc_feature (31)..(31): 3'-3 attached terminal deoxyabasic moeity
gggugccuuuuaaacucaggaguuuaaaagg

SEQ ID NO: 4198 - RNA, 31 nt, Artificial Sequence
  Description of Artificial Sequence:  siNA antisense palindrome
  misc_feature (1)..(1): terminal phosphate
  misc_feature (31)..(31): 3'-3 attached terminal deoxyabasic moeity
gggugccuuuuaaacucgaguuuaaaaggca

SEQ ID NO: 4199 - RNA, 27 nt, Artificial Sequence
  Description of Artificial Sequence:  siNA antisense palindrome
  misc_feature (1)..(1): terminal phosphate
  misc_feature (27)..(27): 3'-3 attached terminal deoxyabasic moeity
gggugccuuuuaaacuaguuuaaaagg

SEQ ID NO: 4200 - RNA, 28 nt, Artificial Sequence
  Description of Artificial Sequence:  siNA antisense palindrome
  misc_feature (1)..(1): terminal phosphate
  misc_feature (28)..(28): 3'-3 attached terminal deoxyabasic moeity
gggugccuuuuaaacuaguuuaaaaggc

SEQ ID NO: 4201 - RNA, 29 nt, Artificial Sequence
  Description of Artificial Sequence:  siNA antisense palindrome
  misc_feature (1)..(1): terminal phosphate
  misc_feature (29)..(29): 3'-3 attached terminal deoxyabasic moeity
gggugccuuuuaaacuaguuuaaaaggca

SEQ ID NO: 4202 - RNA, 30 nt, Artificial Sequence
  Description of Artificial Sequence:  siNA antisense palindrome
  misc_feature (1)..(1): terminal phosphate
  misc_feature (30)..(30): 3'-3 attached terminal deoxyabasic moeity
gggugccuuuuaaacuaguuuaaaaggcac

SEQ ID NO: 4203 - RNA, 26 nt, Artificial Sequence
  Description of Artificial Sequence:  siNA antisense palindrome
  misc_feature (1)..(1): terminal phosphate
  misc_feature (26)..(26): 3'-3 attached terminal deoxyabasic moeity
gggugccuuuuaaacguuuaaaaggc

SEQ ID NO: 4204 - RNA, 27 nt, Artificial Sequence
  Description of Artificial Sequence:  siNA antisense palindrome
  misc_feature (1)..(1): terminal phosphate
  misc_feature (27)..(27): 3'-3 attached terminal deoxyabasic moeity
gggugccuuuuaaacguuuaaaaggca

SEQ ID NO: 4205 - RNA, 28 nt, Artificial Sequence
  Description of Artificial Sequence:  siNA antisense palindrome
  misc_feature (1)..(1): terminal phosphate
  misc_feature (28)..(28): 3'-3 attached terminal deoxyabasic moeity
gggugccuuuuaaacguuuaaaaggcac

SEQ ID NO: 4206 - RNA, 29 nt, Artificial Sequence
  Description of Artificial Sequence:  siNA antisense palindrome
  misc_feature (1)..(1): terminal phosphate
  misc_feature (29)..(29): 3'-3 attached terminal deoxyabasic moeity
ugcugggugccuuuuaaaaggcacccagc

SEQ ID NO: 4207 - RNA, 28 nt, Artificial Sequence
  Description of Artificial Sequence:  siNA antisense palindrome
  misc_feature (1)..(1): terminal phosphate
  misc_feature (28)..(28): 3'-3 attached terminal deoxyabasic moeity
gcugggugccuuuuaaaaggcacccagc

SEQ ID NO: 4208 - RNA, 29 nt, Artificial Sequence
  Description of Artificial Sequence:  siNA antisense palindrome
  misc_feature (1)..(1): terminal phosphate
  misc_feature (29)..(29): 3'-3 attached terminal deoxyabasic moeity
gcugggugccuuuuaaaaggcacccagcn

SEQ ID NO: 4209 - RNA, 27 nt, Artificial Sequence
  Description of Artificial Sequence:  siNA antisense palindrome
  misc_feature (1)..(1): terminal phosphate
  misc_feature (27)..(27): 3'-3 attached terminal deoxyabasic moeity
gcugggugccuuuuaaaaggcacccag

SEQ ID NO: 4210 - RNA, 26 nt, Artificial Sequence
  Description of Artificial Sequence:  siNA antisense palindrome
  misc_feature (1)..(1): terminal phosphate
  misc_feature (26)..(26): 3'-3 attached terminal deoxyabasic moeity
cugggugccuuuuaaaaggcacccag

SEQ ID NO: 4211 - RNA, 25 nt, Artificial Sequence
  Description of Artificial Sequence:  siNA antisense palindrome
  misc_feature (1)..(1): terminal phosphate
  misc_feature (25)..(25): 3'-3 attached terminal deoxyabasic moeity
cugggugccuuuuaaaaggcaccca

SEQ ID NO: 4212 - RNA, 24 nt, Artificial Sequence
  Description of Artificial Sequence:  siNA antisense palindrome
  misc_feature (1)..(1): terminal phosphate
  misc_feature (24)..(24): 3'-3 attached terminal deoxyabasic moeity
ugggugccuuuuaaaaggcaccca

SEQ ID NO: 4213 - RNA, 25 nt, Artificial Sequence
  Description of Artificial Sequence:  siNA antisense palindrome
  misc_feature (1)..(1): terminal phosphate
  misc_feature (25)..(25): 3'-3 attached terminal deoxyabasic moeity
ugggugccuuuuaaaaggcacccan

SEQ ID NO: 4214 - RNA, 26 nt, Artificial Sequence
  Description of Artificial Sequence:  siNA antisense palindrome
  misc_feature (1)..(1): terminal phosphate
  misc_feature (25)..(25): n stands for thymidine
  misc_feature (26)..(26): 3'-3 attached terminal deoxyabasic moeity
ugggugccuuuuaaaaggcacccann

SEQ ID NO: 4215 - RNA, 26 nt, Artificial Sequence
  Description of Artificial Sequence:  siNA antisense palindrome
  misc_feature (1)..(1): terminal phosphate
  misc_feature (26)..(26): 3'-3 attached terminal deoxyabasic moeity
ugcuuuaucauauauaugauaaagca

SEQ ID NO: 4216 - RNA, 25 nt, Artificial Sequence
  Description of Artificial Sequence:  siNA antisense palindrome
  misc_feature (1)..(1): terminal phosphate
  misc_feature (25)..(25): 3'-3 attached terminal deoxyabasic moeity
ugcuuuaucauauauaugauaaagc

SEQ ID NO: 4217 - RNA, 24 nt, Artificial Sequence
  Description of Artificial Sequence:  siNA antisense palindrome
  misc_feature (1)..(1): terminal phosphate
  misc_feature (24)..(24): 3'-3 attached terminal deoxyabasic moeity
gcuuuaucauauauaugauaaagc

SEQ ID NO: 4218 - RNA, 28 nt, Artificial Sequence
  Description of Artificial Sequence:  siNA antisense palindrome
  misc_feature (28)..(28): 3'-3 attached terminal deoxyabasic moeity
aaugcuuuaucauauaugauaaagcauu

SEQ ID NO: 4219 - RNA, 29 nt, Artificial Sequence
  Description of Artificial Sequence:  siNA antisense palindrome
  misc_feature (1)..(1): terminal phosphate
  misc_feature (29)..(29): 3'-3 attached terminal deoxyabasic moeity
aaugcuuuaucauauaugauaaagcauun

SEQ ID NO: 4220 - RNA, 30 nt, Artificial Sequence
  Description of Artificial Sequence:  siNA antisense palindrome
  misc_feature (1)..(1): terminal phosphate
  misc_feature (29)..(29): n stands for thymidine
  misc_feature (30)..(30): 3'-3 attached terminal deoxyabasic moeity
aaugcuuuaucauauaugauaaagcauunn

SEQ ID NO: 4221 - RNA, 27 nt, Artificial Sequence
  Description of Artificial Sequence:  siNA antisense palindrome
  misc_feature (1)..(1): terminal phosphate
  misc_feature (27)..(27): 3'-3 attached terminal deoxyabasic moeity
aaugcuuuaucauauaugauaaagcau

SEQ ID NO: 4222 - RNA, 26 nt, Artificial Sequence
  Description of Artificial Sequence:  siNA antisense palindrome
  misc_feature (1)..(1): terminal phosphate
  misc_feature (26)..(26): 3'-3 attached terminal deoxyabasic moeity
augcuuuaucauauaugauaaagcau

SEQ ID NO: 4223 - RNA, 27 nt, Artificial Sequence
  Description of Artificial Sequence:  siNA antisense palindrome
  misc_feature (1)..(1): terminal phosphate
  misc_feature (27)..(27): 3'-3 attached terminal deoxyabasic moeity
augcuuuaucauauaugauaaagcaun

SEQ ID NO: 4224 - RNA, 28 nt, Artificial Sequence
  Description of Artificial Sequence:  siNA antisense palindrome
  misc_feature (1)..(1): terminal phosphate
  misc_feature (27)..(27): n stands for thymidine
  misc_feature (28)..(28): 3'-3 attached terminal deoxyabasic moeity
augcuuuaucauauaugauaaagcaunn

SEQ ID NO: 4225 - RNA, 25 nt, Artificial Sequence
  Description of Artificial Sequence:  siNA antisense palindrome
  misc_feature (1)..(1): terminal phosphate
  misc_feature (25)..(25): 3'-3 attached terminal deoxyabasic moeity
augcuuuaucauauaugauaaagca

SEQ ID NO: 4226 - RNA, 28 nt, Artificial Sequence
  Description of Artificial Sequence:  siNA antisense palindrome
  misc_feature (1)..(1): terminal phosphate
  misc_feature (28)..(28): 3'-3 attached terminal deoxyabasic moeity
aaugcuuuaucauauaucuauaagcauu

SEQ ID NO: 4227 - RNA, 28 nt, Artificial Sequence
  Description of Artificial Sequence:  siNA antisense palindrome
  misc_feature (1)..(1): terminal phosphate
  misc_feature (28)..(28): 3'-3 attached terminal deoxyabasic moeity
aaugcuuuuaguuauaugauaaagcauu

SEQ ID NO: 4228 - RNA, 28 nt, Artificial Sequence
  Description of Artificial Sequence:  siNA antisense palindrome
  misc_feature (1)..(1): terminal phosphate
  misc_feature (28)..(28): 3'-3 attached terminal deoxyabasic moeity
aauccuuaaucuuauuugauaaagcauu

SEQ ID NO: 4229 - RNA, 28 nt, Artificial Sequence
  Description of Artificial Sequence:  siNA antisense palindrome
  misc_feature (1)..(1): terminal phosphate
  misc_feature (3)..(3): 2'-deoxy-2'-fluoro
  misc_feature (5)..(8): 2'-deoxy-2'-fluoro
  misc_feature (10)..(11): 2'-deoxy-2'-fluoro
  misc_feature (13)..(13): 2'-deoxy-2'-fluoro
  misc_feature (15)..(15): 2'-deoxy-2'-fluoro
  misc_feature (17)..(17): 2'-deoxy-2'-fluoro
  misc_feature (20)..(20): 2'-deoxy-2'-fluoro
  misc_feature (25)..(25): 2'-deoxy-2'-fluoro
  misc_feature (27)..(28): 2'-deoxy-2'-fluoro
  misc_feature (28)..(28): 3'-3 attached terminal deoxyabasic moeity
aaugcuuuaucauauaugauaaagcauu

SEQ ID NO: 4230 - RNA, 28 nt, Artificial Sequence
  Description of Artificial Sequence:  siNA antisense palindrome
  misc_feature (1)..(1): terminal phosphate
  misc_feature (3)..(3): 2'-deoxy-2'-fluoro
  misc_feature (5)..(8): 2'-deoxy-2'-fluoro
  misc_feature (10)..(11): 2'-deoxy-2'-fluoro
  misc_feature (13)..(13): 2'-deoxy-2'-fluoro
  misc_feature (15)..(15): 2'-deoxy-2'-fluoro
  misc_feature (17)..(17): 2'-deoxy-2'-fluoro
  misc_feature (20)..(20): 2'-deoxy-2'-fluoro
  misc_feature (25)..(25): 2'-deoxy-2'-fluoro
  misc_feature (27)..(28): 2'-deoxy-2'-fluoro
  misc_feature (28)..(28): 3'-3 attached terminal deoxyabasic moeity
aaugcuuuaucauauaugauaaagcauu

SEQ ID NO: 4231 - RNA, 21 nt, Artificial Sequence
  Description of Artificial Sequence:  siNA sense region
  misc_feature (1)..(1): optionally attached terminal abasic, inverted abasic, inverted nucleotide or other terminal cap moiety
  misc_feature (21)..(21): optionally attached terminal abasic, inverted abasic, inverted nucleotide or other terminal cap moiety
  misc_feature (1)..(19): n stands for any ribonucleotide
  misc_feature (20)..(21): n stands for any nucleotide
nnnnnnnnnnnnnnnnnnnnn

SEQ ID NO: 4232 - RNA, 21 nt, Artificial Sequence
  Description of Artificial Sequence:  siNA antisense region
  misc_feature (21)..(21): optionally attached terminal glyceryl, abasic, inverted abasic, inverted nucleotide or other terminal cap moiety
  misc_feature (20)..(21): Optional phosphorothioate or phosphorodithioate internucleotide linkage
  misc_feature (1)..(19): n stands for any ribonucleotide
  misc_feature (20)..(21): n stands for any nucleotide
nnnnnnnnnnnnnnnnnnnnn

SEQ ID NO: 4233 - RNA, 21 nt, Artificial Sequence
  Description of Artificial Sequence:  siNA sense region
  misc_feature (1)..(19): n stands for any nucleotide wherein any pyrimidine present is 2'-Fluoro and any purine is 2'-O-methyl
  misc_feature (20)..(21): n stands for any nucleotide
  misc_feature (20)..(21): Optional phosphorothioate or phosphorodithioate internucleotide linkage
nnnnnnnnnnnnnnnnnnnnn

SEQ ID NO: 4234 - RNA, 21 nt, Artificial Sequence
  Description of Artificial Sequence:  siNA antisense region
  misc_feature (1)..(19): n stands for any nucleotide wherein any pyrimidine is 2'-Fluoro and any purine is 2'-O-methyl
  misc_feature (20)..(21): n stands for any nucleotide
  misc_feature (20)..(21): Optional phosphorothioate or phosphorodithioate internucleotide linkage
  misc_feature (21)..(21): optionally attached terminal glyceryl, abasic, inverted abasic, inverted nucleotide or other terminal cap moiety
nnnnnnnnnnnnnnnnnnnnn

SEQ ID NO: 4235 - RNA, 21 nt, Artificial Sequence
  Description of Artificial Sequence:  siNA sense region
  misc_feature (1)..(19): n stands for any nucleotide wherein any pyrimidine is 2'-O-methyl or 2'-Fluoro
  misc_feature (20)..(21): n stands for any nucleotide
  misc_feature (1)..(1): optionally attached terminal abasic, inverted abasic, inverted nucleotide or other terminal cap moiety
  misc_feature (21)..(21): optionally attached terminal abasic, inverted abasic, inverted nucleotide or other terminal cap moiety
nnnnnnnnnnnnnnnnnnnnn

SEQ ID NO: 4236 - RNA, 21 nt, Artificial Sequence
  Description of Artificial Sequence:  siNA antisense region
  misc_feature (1)..(19): n stands for any nucleotide wherein any pyrimidine is 2'-Fluoro
  misc_feature (20)..(21): Optional phosphorothioate or phosphorodithioate internucleotide linkage
  misc_feature (20)..(21): n stands for any nucleotide
  misc_feature (21)..(21): optionally attached terminal glyceryl, abasic, inverted abasic, inverted nucleotide or other terminal cap moiety
nnnnnnnnnnnnnnnnnnnnn

SEQ ID NO: 4237 - RNA, 21 nt, Artificial Sequence
  Description of Artificial Sequence:  siNA sense region
  misc_feature (1)..(19): n stands for any nucleotide wherein any pyrimidine is 2'-Fluoro and any purine nucleotide present is 2'-Deoxy
  misc_feature (20)..(21): n stands for any nucleotide
  misc_feature (1)..(1): optionally attached terminal abasic, inverted abasic, inverted nucleotide or other terminal cap moiety
  misc_feature (21)..(21): optionally attached terminal abasic, inverted abasic, inverted nucleotide or other terminal cap moiety
nnnnnnnnnnnnnnnnnnnnn

SEQ ID NO: 4238 - RNA, 21 nt, Artificial Sequence
  Description of Artificial Sequence:  siNA sense region
  misc_feature (1)..(19): n stands for any nucleotide wherein any pyrimidine is 2'-Fluoro
  misc_feature (20)..(20): Optional phosphorothioate or phosphorodithioate internucleotide linkage
  misc_feature (20)..(21): n stands for any nucleotide
  misc_feature (1)..(1): optionally attached terminal abasic, inverted abasic, inverted nucleotide or other terminal cap moiety
  misc_feature (21)..(21): optionally attached terminal abasic, inverted abasic, inverted nucleotide or other terminal cap moiety
nnnnnnnnnnnnnnnnnnnnn

SEQ ID NO: 4239 - RNA, 21 nt, Artificial Sequence
  Description of Artificial Sequence:  siNA antisense region
  misc_feature (1)..(19): n stands for any nucleotide wherein any pyrimidine is 2'-Fluoro and any purine is 2'-deoxy
  misc_feature (20)..(21): n stands for any nucleotide
  misc_feature (21)..(21): optionally attached terminal glyceryl, abasic, inverted abasic, inverted nucleotide or other terminal cap moiety
nnnnnnnnnnnnnnnnnnnnn

SEQ ID NO: 4240 - RNA, 21 nt, Artificial Sequence
  Description of Artificial Sequence:  siNA sense region
  misc_feature (1)..(1): optionally attached terminal abasic, inverted abasic, inverted nucleotide or other terminal cap moiety
  misc_feature (21)..(21): optionally attached terminal abasic, inverted abasic, inverted nucleotide or other terminal cap moiety
  misc_feature (20)..(21): n stands for thymidine
uggaguuacccugaugaaann

SEQ ID NO: 4241 - RNA, 21 nt, Artificial Sequence
  Description of Artificial Sequence:  siNA antisense region
  misc_feature (21)..(21): optionally attached terminal glyceryl, abasic, inverted abasic, inverted nucleotide or other terminal cap moiety
  misc_feature (20)..(21): Optional phosphorothioate or phosphorodithioate internucleotide linkage
  misc_feature (20)..(21): n stands for thymidine
uuucaucaggguaacuccann

SEQ ID NO: 4242 - RNA, 21 nt, Artificial Sequence
  Description of Artificial Sequence:  siNA sense region
  misc_feature (20)..(21): n stands for thymidine
  misc_feature (20)..(21): Optional phosphorothioate or phosphorodithioate internucleotide linkage
  misc_feature (1)..(1): 2'-O-methyl
  misc_feature (6)..(7): 2'-O-methyl
  misc_feature (9)..(12): 2'-O-methyl
  misc_feature (15)..(15): 2'-O-methyl
  misc_feature (2)..(5): 2'-deoxy-2'-fluoro
  misc_feature (8)..(8): 2'-deoxy-2'-fluoro
  misc_feature (13)..(14): 2'-deoxy-2'-fluoro
  misc_feature (16)..(19): 2'-deoxy-2'-fluoro
uggaguuacccugaugaaann

SEQ ID NO: 4243 - RNA, 21 nt, Artificial Sequence
  Description of Artificial Sequence:  siNA antisense region
  misc_feature (20)..(21): n stands for thymidine
  misc_feature (20)..(21): Optional phosphorothioate or phosphorodithioate internucleotide linkage
  misc_feature (21)..(21): optionally attached terminal glyceryl, abasic, inverted abasic, inverted nucleotide or other terminal cap moiety
  misc_feature (1)..(4): 2'-deoxy-2'-fluoro
  misc_feature (6)..(7): 2'-deoxy-2'-fluoro
  misc_feature (12)..(12): 2'-deoxy-2'-fluoro
  misc_feature (15)..(18): 2'-deoxy-2'-fluoro
  misc_feature (5)..(5): 2'-O-methyl
  misc_feature (4)..(5): 2'-O-methyl
  misc_feature (8)..(11): 2'-O-methyl
  misc_feature (13)..(14): 2'-O-methyl
  misc_feature (19)..(19): 2'-O-methyl
uuucaucaggguaacuccann

SEQ ID NO: 4244 - RNA, 21 nt, Artificial Sequence
  Description of Artificial Sequence:  siNA sense region
  misc_feature (20)..(21): n stands for thymidine
  misc_feature (1)..(1): optionally attached terminal abasic, inverted abasic, inverted nucleotide or other terminal cap moiety
  misc_feature (21)..(21): optionally attached terminal abasic, inverted abasic, inverted nucleotide or other terminal cap moiety
  misc_feature (1)..(1): 2'-O-methyl or 2'-Fluoro
  misc_feature (6)..(7): 2'-O-methyl or 2'-Fluoro
  misc_feature (9)..(12): 2'-O-methyl or 2'-Fluoro
  misc_feature (15)..(15): 2'-O-methyl or 2'-Fluoro
uggaguuacccugaugaaann

SEQ ID NO: 4245 - RNA, 21 nt, Artificial Sequence
  Description of Artificial Sequence:  siNA antisense region
  misc_feature (20)..(21): Optional phosphorothioate or phosphorodithioate internucleotide linkage
  misc_feature (20)..(21): n stands for thymidine
  misc_feature (21)..(21): optionally attached terminal glyceryl, abasic, inverted abasic, inverted nucleotide or other terminal cap moiety
  misc_feature (1)..(4): 2'deoxy-2'-Fluoro
  misc_feature (6)..(7): 2'-deoxy-2'-Fluoro
  misc_feature (12)..(12): 2'-deoxy-2'-Fluoro
  misc_feature (15)..(15): 2'-deoxy-2'-Fluoro
  misc_feature (17)..(18): 2'-deoxy-2'-Fluoro
uuucaucaggguaacuccann

SEQ ID NO: 4246 - RNA, 21 nt, Artificial Sequence
  Description of Artificial Sequence:  siNA sense region
  misc_feature (20)..(21): n stands for thymidine
  misc_feature (1)..(1): optionally attached terminal abasic, inverted abasic, inverted nucleotide or other terminal cap moiety
  misc_feature (21)..(21): optionally attached terminal abasic, inverted abasic, inverted nucleotide or other terminal cap moiety
  misc_feature (2)..(5): 2'-deoxy
  misc_feature (8)..(8): 2'-deoxy
  misc_feature (13)..(14): 2'-deoxy
  misc_feature (16)..(19): 2'-deoxy
  misc_feature (1)..(1): 2'-deoxy-2'-Fluoro
  misc_feature (6)..(7): 2'-deoxy-2'-Fluoro
  misc_feature (9)..(12): 2'-deoxy-2'-Fluoro
  misc_feature (15)..(15): 2'-deoxy-2'-Fluoro
uggaguuacccugaugaaann

SEQ ID NO: 4247 - RNA, 21 nt, Artificial Sequence
  Description of Artificial Sequence:  siNA sense region
  misc_feature (20)..(21): n stands for thymidine
  misc_feature (1)..(1): optionally attached terminal abasic, inverted abasic, inverted nucleotide or other terminal cap moiety
  misc_feature (1)..(1): 2'-deoxy-2'-Fluoro
  misc_feature (6)..(7): 2'-deoxy-2'-Fluoro
  misc_feature (9)..(12): 2'-deoxy-2'-Fluoro
  misc_feature (15)..(15): 2'-deoxy-2'-Fluoro
  misc_feature (21)..(21): optionally attached terminal abasic, inverted abasic, inverted nucleotide or other terminal cap moiety
uggaguuacccugaugaaann

SEQ ID NO: 4248 - RNA, 21 nt, Artificial Sequence
  Description of Artificial Sequence:  siNA antisense region
  misc_feature (20)..(21): n stands for any thymidine
  misc_feature (21)..(21): optionally attached terminal glyceryl, abasic, inverted abasic, inverted nucleotide or other terminal cap moiety
  misc_feature (5)..(5): 2'-deoxy
  misc_feature (8)..(11): 2'-deoxy
  misc_feature (13)..(14): 2'-deoxy
  misc_feature (16)..(16): 2'-deoxy
  misc_feature (19)..(19): 2'-deoxy
  misc_feature (1)..(4): 2'-deoxy-2'-Fluoro
  misc_feature (6)..(7): 2'-deoxy-2'-Fluoro
  misc_feature (12)..(12): 2'-deoxy-2'-Fluoro
  misc_feature (15)..(15): 2'-deoxy-2'-Fluoro
  misc_feature (17)..(18): 2'-deoxy-2'-Fluoro
uuucaucaggguaacuccann

SEQ ID NO: 4249 - RNA, 14 nt, Artificial Sequence
  Description of Artificial Sequence:  Target Sequence
auauaucuauuucg

SEQ ID NO: 4250 - RNA, 14 nt, Artificial Sequence
  Description of Artificial Sequence:  Complement to Target Sequence
cgaaauaguauaua

SEQ ID NO: 4251 - RNA, 22 nt, Artificial Sequence
  Description of Artificial Sequence:  appended target/complement
cgaaauaguauauacuauuucg

SEQ ID NO: 4252 - RNA, 24 nt, Artificial Sequence
  Description of Artificial Sequence:  Duplex forming oligonucleotide
  misc_feature (23)..(24): n stands for thymidine
cgaaauaguauauacuauuucgnn

1. A multifunctional siNA molecule comprising a structure having Formula MF-III:
$$\begin{matrix}X & {X}^{′} \\ {Y}^{′} - W - Y & \end{matrix}$$
wherein
(a) each X, X′, Y, and Y′ is independently an oligonucleotide of length about 15 nucleotides to about 50 nucleotides;
(b) X comprises nucleotide sequence that is complementary to nucleotide sequence present in region Y′;
(c) X′ comprises nucleotide sequence that is complementary to nucleotide sequence present in region Y;
(d) each X and X′ is independently of length sufficient to stably interact with a first VEGF or VEGFR and a second interleukin or interleukin receptor target nucleic acid sequence, respectively, or a portion thereof;
(e) W represents a nucleotide or non-nucleotide linker that connects sequences Y′ and Y; and
(f) said multifunctional siNA directs cleavage of the first VEGF or VEGFR and second interleukin or interleukin receptor target sequence via RNA interference.

2. The multifunctional siNA molecule of claim 1, wherein W connects the 3′-end of sequence Y′ with the 3′-end of sequence Y.

3. The multifunctional siNA molecule of claim 1, wherein W connects the 3′-end of sequence Y′ with the 5′-end of sequence Y.

4. The multifunctional siNA molecule of claim 1, wherein W connects the 5′-end of sequence Y′ with the 5′-end of sequence Y.

5. The multifunctional siNA molecule of claim 1, wherein W connects the 5′-end of sequence Y′ with the 3′-end of sequence Y.

6. The multifunctional siNA molecule of claim 1, wherein a terminal phosphate group is present at the 5′-end of any of sequence X, X′, Y, or Y′.

7. The multifunctional siNA molecule of claim 1, wherein W connects sequences Y and Y′ via a biodegradable linker.

8. The multifunctional siNA molecule of claim 1, wherein W further comprises a conjugate, label, aptamer, ligand, lipid, or polymer.

9. The multifunctional siNA molecule of claim 1, wherein any of sequence X, X′, Y, or Y′ comprises a 3′-terminal cap moiety.

10. The multifunctional siNA molecule of claim 9, wherein said terminal cap moiety is an inverted deoxyabasic moiety.

11. The multifunctional siNA molecule of claim 10, wherein said terminal cap moiety is an inverted deoxynucleotide moiety.

12. The multifunctional siNA molecule of claim 10, wherein said terminal cap moiety is a dinucleotide moiety.

13. The multifunctional siNA molecule of claim 12, wherein said dinucleotide is dithymidine (TT).

14. The multifunctional siNA molecule of claim 1, wherein said siNA molecule comprises no ribonucleotides.

15. The multifunctional siNA molecule of claim 1, wherein said siNA molecule comprises one or more ribonucleotides.

16. The multifunctional siNA molecule of claim 1, wherein any purine nucleotide in said siNA is a 2′-O-methyl purine nucleotide.

17. The multifunctional siNA molecule of claim 1, wherein any purine nucleotide in said siNA is a 2′-deoxy purine nucleotide.

18. The multifunctional siNA molecule of claim 1, wherein any pyrimidine nucleotide in said siNA is a 2′-deoxy-2′-fluoro pyrimidine nucleotide.

19. The multifunctional siNA molecule of claim 1, wherein each X, X′, Y, and Y′ independently comprises about 19 to about 23 nucleotides.

20. The multifunctional siNA molecule of claim 1, wherein said first target sequence is a VEGF RNA sequence, and said second target sequence is an interleukin RNA sequence.

21. The multifunctional siNA molecule of claim 1, wherein said first target sequence is a VEGF RNA sequence, and said second target sequence is an interleukin receptor RNA sequence.

22. The multifunctional siNA molecule of claim 1, wherein said first target sequence is a VEGFR RNA sequence, and said second target sequence is an interleukin RNA sequence.

23. The multifunctional siNA molecule of claim 1, wherein said first target sequence is a VEGFR RNA sequence, and said second target sequence is an interleukin receptor RNA sequence.

24. The multifunctional siNA molecule of claim 20, wherein said interleukin RNA sequence is selected from the group consisting of IL-1, IL-2, IL-3, IL-4, IL-5, IL-6, IL-7, IL-8, IL-9, IL-10, IL-11, IL-12, IL-13, IL-14, IL-15, IL-16, IL-17, IL-18, IL-19, IL-20, IL-21, IL-22, IL-23, IL-24, IL-25, IL-26, and IL-27 RNA sequence.

25. The multifunctional siNA molecule of claim 21, wherein said interleukin receptor RNA sequence is selected from the group consisting of IL-1R, IL-2R, IL-3R, IL-4R, IL-5R, IL-6R, IL-7R, IL-8R, IL-9R, IL-10R, IL-11R, IL-12R, IL-13R, IL-14R, IL-15R, IL-16R, IL-17R, IL-18R, IL-19R, IL-20R, IL-21R, IL-22R, IL-23R, IL-24R, IL-25R, IL-26R, and IL-27R RNA sequence.

26. The multifunctional siNA molecule of claim 22, wherein said interleukin RNA sequence is selected from the group consisting of IL-1, IL-2, IL-3, IL-4, IL-5, IL-6, IL-7, IL-8, IL-9, IL-10, IL-11, IL-12, IL-13, IL-14, IL-15, IL-16, IL-17, IL-18, IL-19, IL-20, IL-21, IL-22, IL-23, IL-24, IL-25, IL-26, and IL-27 RNA sequence.

27. The multifunctional siNA molecule of claim 23, wherein said interleukin receptor RNA sequence is selected from the group consisting of IL-1R, IL-2R, IL-3R, IL-4R, IL-5R, IL-6R, IL-7R, IL-8R, IL-9R, IL-10R, IL-11R, IL-12R, IL-13R, IL-14R, IL-15R, IL-16R, IL-17R, IL-18R, IL-19R, IL-20R, IL-21R, IL-22R, IL-23R, IL-24R, IL-25R, IL-26R, and IL-27R RNA sequence.

28. The multifunctional siNA molecule of claim 22, wherein said VEGFR RNA sequence is selected from the group consisting of VEGFR1, VEGFR2, and VEGFR3 RNA sequence.

29. The multifunctional siNA molecule of claim 23, wherein said VEGFR RNA sequence is selected from the group consisting of VEGFR1, VEGFR2, and VEGFR3 RNA sequence.

30. A pharmaceutical composition comprising the multifunctional siNA molecule of claim 1 and an acceptable carrier or diluent.

31. A method of treating respiratory disease in a subject, comprising administering to the subject a siNA molecule under conditions suitable for said treatment, wherein said siNA molecule directs cleavage of a VEGF RNA via RNA interference (RNAi), and wherein:
a) each strand of said siNA molecule is about 18 to about 28 nucleotides in length; and
b) one strand of said siNA molecule comprises nucleotide sequence having sufficient complementarity to said VEGF RNA for the siNA molecule to direct cleavage of the VEGF RNA via RNA interference.

32. A method of treating respiratory disease in a subject, comprising administering to the subject a siNA molecule under conditions suitable for said treatment, wherein said siNA molecule directs cleavage of a VEGFR RNA via RNA interference (RNAi), and wherein:
a) each strand of said siNA molecule is about 18 to about 28 nucleotides in length; and
b) one strand of said siNA molecule comprises nucleotide sequence having sufficient complementarity to said VEGFR RNA for the siNA molecule to direct cleavage of the VEGFR RNA via RNA interference.

33. A method of treating respiratory disease in a subject, comprising administering to the subject a siNA molecule under conditions suitable for said treatment, wherein said siNA molecule directs cleavage of a VEGF or VEGFR RNA and an interleukin or interleukin receptor RNA via RNA interference (RNAi), and wherein:
a) each strand of said siNA molecule is about 18 to about 28 nucleotides in length;
b) a first strand of said siNA molecule comprises nucleotide sequence having sufficient complementarity to said VEGF or VEGFR RNA for the siNA molecule to direct cleavage of the VEGF or VEGFR RNA via RNA interference; and
c) a second strand of said siNA molecule comprises nucleotide sequence having sufficient complementarity to said interleukin or interleukin receptor RNA for the siNA molecule to direct cleavage of the interleukin or interleukin receptor RNA via RNA interference.

34. The method of claim 31, wherein said respiratory disease is selected from the group consisting of asthma, COPD, and allergic rhinitis.

35. The method of claim 32, wherein said respiratory disease is selected from the group consisting of asthma, COPD, and allergic rhinitis.

36. The method of claim 33, wherein said respiratory disease is selected from the group consisting of asthma, COPD, and allergic rhinitis.
